(19) United States
(12) Patent Application Publication
(10) Pub. No.: US 2022/0088183 A1
(43) Pub. Date: Mar. 24, 2022

(54) CHIMERIC ONCOLYTIC HERPESVIRUS THAT STIMULATES AN ANTITUMOR IMMUNE RESPONSE

(71) Applicant: THE RESEARCH INSTITUTE AT NATIONWIDE CHILDREN'S HOSPITAL, Columbus, OH (US)

(72) Inventors: Kevin A. Cassady, Columbus, OH (US); Justin C. Roth, Birmingham, AL (US)

(21) Appl. No.: 17/271,403

(22) PCT Filed: Aug. 30, 2019
(86) PCT No.: PCT/US19/49047

§ 371 Date: Feb. 25, 2021

Related U.S. Application Data
(60) Provisional application No. 62/725,809, filed on Aug. 31, 2018.
(60) Provisional application No. 62/731,365, filed on Sep. 14, 2018.

(51) Int. Cl. A61K 39/245; A61K 39/00

(52) U.S. Cl. CPC A61K 39/245; A61K 2039/80; A61K 2039/5254; A61K 39/0011

(57) ABSTRACT

A chimeric oncolytic virus is described that includes a herpesvirus having a modified nucleic acid sequence, including a modification of the herpesvirus gamma (1)34.5 gene (γ₁34.5) or a nucleic acid with at least about 70% homology to the γ₁34.5 gene that reduces its expression; a second viral nucleic acid sequence encoding a PKR evasion protein that does not cause virulence; and a third nucleic acid sequence encoding a tumor-associated antigen. Methods of using the chimeric oncolytic virus to treat subjects having cancer, or to vaccinate subjects at risk of developing cancer, are also described.

### CROSS-REFERENCE TO RELATED APPLICATIONS

[0001] This application claims the benefit of U.S. Provisional Application No. 62/725,809, filed Aug. 31, 2018, and U.S. Provisional Application No. 62/731,365, filed Sep. 14, 2018, both of which are incorporated herein by reference.

### GOVERNMENT FUNDING

[0002] The present invention was made with government support under Grant No. CA071933 awarded by the National Institutes of Health. The US government has certain rights in this invention.

### SEQUENCE LISTING

[0003] The instant application contains a Sequence Listing which has been submitted electronically in ASCII format and is hereby incorporated by reference in its entirety. Said ASCII copy, created on Aug. 24, 2018, is named NCH-027861US PRO SEQUENCE LISTING_ST25 and is 8,621 bytes in size.

### BACKGROUND

[0004] Cancer immunotherapy is a novel treatment option that involves priming the immune system for tumor cell eradication. Immunotherapies have been used to overcome the limited efficacy of the classic therapeutic options like surgery, radio-, chemo-, or antibody-therapy for patients with advanced stage solid tumor. While some tumors have been successfully treated with immunotherapeutic approaches others have been more resistant. Solid tumors and tumors with lower mutational loads (e.g. Pediatric Cancers) are harder to target. These lower mutational burden however, often express membrane associated fetal antigens (e.g. EphA2, GD2, IL13Ra2, EGFR VIII) that contribute their transformation and provide potential immunotherapeutic targets. Gros et al., Nature medicine, 22:433-8 (2016).

[0005] Two promising areas in immunotherapy involve pulsing dendritic cells with a cocktail of antigen peptides to vaccinate against the tumor (Phuphanich et al., Cancer immunology, immunotherapy: CII, 62:125-35 (2013)) and oncolytic viruses (OV). Markert et al., Mol Ther., 17:199-207 (2009). Although they are distinct approaches, both strategies likely achieve efficacy through induction of anti-tumor immunity. Brown M C, Gromeier M., Curr Opin Virol., 13:81-5 (2015). Viro-immunotherapy is based on biologic anticancer agents that preferentially target tumor cells while sparing normal cells. Oncolytic HSVs have been safely used in clinical trials in a wide range of cancer types including brain tumors. With improved mechanistic understanding of how viral replication and host immune mediated responses contribute to the anti-tumor response, newer next gene have been engineered to improve their efficacy and/or safety profile. Ghonime M G, Cassady K A., Cancer immunology research 2018; 6:1499-510

[0006] Gliomas are the most frequently occurring primary malignant brain tumors, with glioblastoma multiforme (GBM) being one of the most fatal and treatment-refractory cancers. Since median time to progression and median survival of these patients have changed minimally in the past fifty years, new multimodal treatment strategies are needed. Genetically-modified HSV are attractive as replication-competent, oncolytic vectors, and their genome facilitates high level transgene expression for multimodal treatment approaches. Although their safety has been demonstrated in clinical trials, first generation oHSVs are limited by poor replication in tumors. Markert et al., Rev Med Virol, 10(1): p. 17-30 (2000). Poor replication arises from safety precautions that dictate removal of the γ₁34.5 gene, which prevents neurovirulence, but also abrogates viral resistance to host interferon (IFN) signaling pathways that trigger translational arrest. Wakimoto et al., Gene Ther, 10(11): p. 983-90 (2003).

[0007] A number of oHSV genes required for efficient replication also actively suppress host gene expression and antigen processing pathways. HSV-1 encoded ICP47, US3 kinase, and gB proteins suppress peptide loading on—or surface expression of—MHC class I and II molecules. Fruh et al., Nature, 375(6530): p. 415-8 (1995); Imai et al., PLoS One, 8(8): p. e72050 (2013). Similarly, the virion host shutoff (VHS) protein in oHSV reduces host gene expression, including potential tumor antigens, by degrading host cell transcripts in infected cells. Taddeo et al., J Virol, 87(8): p. 4516-22 (2013) The concerted action of these viral proteins allow for selective viral gene expression and cloaking of infected cells from immune surveillance mechanisms. Therefore, the use of oHSV for eliciting effective anti-GBM responses will likely require viruses that effectively reverse the immunosuppressive state in GBMs and specifically enhance acquired responses to TAAs.

[0008] oHSV infection itself is thought to transiently reverse the immunosuppressive tumor microenvironment and stimulate adaptive responses. Iizuka et al., Int J Cancer, 118(4): p. 942-9 (2006). Host cell anti-viral responses induce IFN and cytokine signaling that culminate in recruitment and activation of innate immune cells (neutrophils, NK cells, dendritic cells (DCs) and macrophages) and subsequent stimulation of adaptive (CD4+, CD8+) responses. Miller et al., Cancer Res, 60(20): p. 5714-22 (2000). Although this contributes to viral clearance, it is also believed to indirectly stimulate antitumor responses. Parker et al., Cancer Gene Ther, 12(4): p. 359-68 (2005). A number of studies support this hypothesis. First, oHSV engineered to express proinflammatory genes (IL-12, IL-18, IL-4, TNF-α) have enhanced anti-tumor effects. For example, treatment with an IL-12- and CCL2-expressing oHSV increased recruitment of activated macrophages and T cells and improved survival without decreasing viral replication. Second, preexisting HSV immunity improves oHSV efficacy and survival and this survival advantage is lost in immune-suppressed mice. Miller et al., Mol Ther, 7(6): p. 741-7 (2003). Finally, transcriptional array analyses from a Phase Ib clinical trial of the Δγ₁34.5 oHSV (G207) suggest that anti-viral immune responses contributed to anti-GBM activity, as long-term survivors (>6 ms) exhibited greater inflammatory and interferon-stimulated gene expression, compared to non-responders (survival <3 ms).

[0009] Virotherapy is a mature experimental therapy and in some cases has FDA approval. Talimogene laherparepvec (T-VEC), an attenuated herpes simplex virus incorporating a granulocyte-macrophage colony-stimulating factor (GM-CSF) transgene, is the first in class FDA approved oncolytic HSV for treatment of advanced, unresectable stage 3 and 4 melanoma by intralesional injection. Pol et al., Oncoimmunology, 5:e1115641 (2016). As an immunotherapeutic, the repeated dosing of virus and combining virus with other immunomodulators improved clinical response in patients with therapy resistant melanoma. C134 is another next-generation oHSV with improved protein translation and replication over first generation oHSVs in cells with defective PAMP sensing and IFN signaling. In non-malignant cells, C134 induces IRF3 mediated IFN and Cytokine signaling thus restricting efficient viral replication in the tumor cells. Cassady et al., Journal of Virology, 86:610-4 C134 (2012), maintains late viral protein synthesis and replicates better than 1st gen viruses and this leads to increased cytopathic effect (CPE) and antigen load but remains as safe as the parent Δγ134.5 HSV (18-20). Not only the oncolytic HSV has direct anti-tumor activity caused by viral replication and lysis in infected cells but also it elicits an immune response that contributes to the overall anti-tumor activity. Introducing an OV does cause cellular damage and lead to the release of tumor antigens from virally-infected cells, pro-inflammatory pathogen-associated molecular pattern (PAMP) and damage-associated molecular pattern (DAMP), cytokines and chemokines produced during viral infection stimulate the immune response and reverse tumor associated immunosuppression. Russell S J, Barber G N., Cancer cell, 33:599-605 (2018).

[0010] Because of their intrinsic antigenicity, tumors have evolved to evade immune surveillance, and have sluggish pathogen-associated molecular pattern (PAMP) and damage-associated molecular pattern (DAMP) responses and defective antigen presentation by down-regulating antigen processing machinery such as the major histocompatibility complex (MHC) I pathway, proteosome subunits latent membrane protein (LMP)2 and LMP7, tapasin, and transporter associated with antigen processing (TAP) protein. Johnsen et al., J. of immunology, 163:4224-31 (1999) Thus, the expression of tumor antigens is downregulated and the ability of cytotoxic T lymphocytes to recognize apparent tumor cells and promote tolerance is impeded. Maeurer et al., J Clin Invest., 98(7):1633-41 (1996). Replication of the oncolytic virus causes cell death, ultimately inducing pro-inflammatory DAMP and PAMP responses, and promoting phagocytosis of dead or damaged virus-infected tumor cells. Viral infections are well-described at breaking immune tolerance and inducing auto-immunity to self-antigen. Steed A L, Stappenbeck T S., Curr Opin Immunol., 31:102-7 (2014) HSV is no exception and can induce a systemic auto-immune reaction (erythema multiforme), (Lucchese A., Autoimmun Rev, 17:576-81 (2018)) a T cell mediated keratitis (Buela K A, Hendricks R L, J Immunol, 194:379-87 (2015)), and a persistent auto-immune encephalitis (Nosadini et al., Dev Med Child Neurol 59:796-805 (2017)). The virus induces a robust inflammatory and immune mediated response during lytic infection. Like all viruses, it has evolved to survive the antiviral response and confines the peak of the immune response during its lytic phase. Cassady et al., Viruses, 4; 8 pii E43 (2016). Over time this inflammatory and immune mediated response restricts viral lytic infection: eliciting innate and adaptive immune responses that result in long-term immune responses mediated by T cells. Melzer et al., Biomedicines, 5(1). pii: E8 (2017) While oHSV-infection recruits immune effectors, it also reduces host gene expression in the infected cell enabling selective viral gene expression and suppressing immediate host immune detection. C134's ability to maintain protein translation in infected cells while stimulating the IFN response make it particularly well suited as multimodal therapeutic platform.

### SUMMARY

[0011] Gliomas are the most frequently occurring primary malignant brain tumors, with glioblastoma multiforme (GBM) being one of the most fatal and treatment-refractory cancers. Based on the mortality rates and the morbidity associated with current regimens, it is clear that new therapeutic options are needed. Oncolytic herpes viruses (oHSV) represent a novel therapeutic for treatment-refractory cancers and have demonstrated efficacy in early phase clinical trials. oHSV mediate direct anti-tumor effects through lytic replication in tumors cells, but more recent data suggest that the indirect immune-stimulating effects of oHSV may have a greater impact on their efficacy. In this regard, oHSV infections trigger host cell anti-viral signaling pathways that prime both anti-viral and anti-tumor immune responses. The inventors have created a novel oHSV (C134) that synthesizes proteins and replicates better in the tumor (direct oncolytic properties) and has enhanced immune stimulation potential (indirect properties). They have also shown that expression of tumor proteins (tumor associated antigens: TAAs) will stimulate an immune response against the tumor and that by engineering the TAAs such that they are secreted and bind to specialized antigen presenting immune cells will “vaccinate” and induce a long-term anti-tumor immune response even after the virus is gone. The inventors have also demonstrated that they can enhance tumor-specific immune responses, rather than those directed at viral antigens, by engineering C134 to express tumor antigens that are secreted from the infected cells and targeted to professional antigen presenting cells.

### BRIEF DESCRIPTION OF THE SEQUENCES

SEQ ID NO: 1: is a γ₁34.5 gene derived from a herpes simplex virus 1: atggcccgcc
gccgccgcca tcgcggcccc cgccgccccc ggccgcccgg gcccacgggcgccgtcccaa ccgcacagtc ccaggtaacc
tccacgccca actcggaacc cgcggtcagg agcgcgcccg cggccgcccc gccgccgccc cccgccggtg ggcccccgcc
ttcttgttcg ctgctgctgc gccagtggct ccacgttccc gagtccgcgt ccgacgacga cgatgacgac gactggccgg
acagcccccc gcccgagccg gcgccagagg cccggcccac cgccgccgcc ccccggcccc ggcccccacc
gcccggcgtg ggcccggggg gcggggctga cccctcccac cccccctcgc gccccttccg ccttccgccg cgcctcgccc
tccgcctgcg cgtcaccgcg gagcacctgg cgcgcctgcg cctgcgacgc gcgggcgggg agggggcgcc
ggagcccccc gcgacccccg cgacccccgc gacccccgcg acccccgcga cccccgcgcg ggtgcgcttc tcgccccacg
tccgggtgcg ccacctggtg gtctgggcct cggccgcccg cctggcgcgc cgcggctcgt gggcccgcga gcgggccgac
cgggctcggt tccggcgccg ggtggcggag gccgaggcgg tcatcgggcc gtgcctgggg cccgaggccc gtgcccgggc
cctggcccgc ggagccggcc cggcgaactc ggtctaa
SEQ ID NO: 2 is an IRS-1 sequence derived from a human cytomegalovirus: atggcccagc
gcaacggcat gtcgccgcgc cccccgcccc ttggtcgcgg ccgcggggcc ggagggcctt cgggggttgg ttcctctcct
ccttcttctt gtgtgccgat gggagcgccg tcaacagcgg gcactggtgc gagtgctgcg gctacgacga cgccgggcca
cggcgtccac cgggtagaac cccgcgggcc gccgggcgcc cctccgagta gcggcaacaa tagcaacttt tggcacggcc
cggagcgcct gttgctgtct cagattccgg tggagcgcca ggcgctgacg gagctggaat accaggccat gggcgccgtg
tggcgcgcgg cglittlggc caacagcacg ggccgcgcca tgcgcaagtg gtcgcagcgc gacgcgggca cgctgctgcc
gctcggacgg ccgtacggat tctacgcgcg ggtgacgccg cgcagccaga tgaacggcgt gggcgcgacg gacctgcgtc
aactgtcgcc gcgggacgcg tggatcgtac tggtggctac cgtggtgcac gaggtggacc ccgcagccga cccgacggtg
ggcgacaagg ccggccatcc cgagggtctg tgcgcgcagg acggactgta cctggcgctg ggcgccgggt tccgcgtgtt
cgtgtacgac ctggcaaaca acacgctgat cctagcggcg cgcgacgcgg acgagtggtt tcggcacggc gcgggcgagg
tggtgcggct gtaccgctgc aaccggctgg gcgtgggcac cccgcgcgcg acgctgctgc ctcagccggc gctccgacag
acgttgctgc gcgccgagga ggcgacggcg ctcggacggg agctgcgccg gcggtgggcc ggcacgacgg
tggcgctgca gacgccgggc aggcgactgc agccgatggt actgctgggc gcgtggcagg agctggcgca gtacgagccg
ttcgcgtcgg cgccgcaccc cgcgtcgctg ctgacggccg tgcgtcggca cctgaaccag cgtctgtgct gcggctggct
ggcgctgggc gcggtgctgc ccgcgcggtg gctgggctgc gcggcggggc cggcgacggg gacggcggcg
gggacgacgt cgccgccagc ggcgagcggc acggagacgg aggccgccgg cggggacgcg ccgtgcgcga
tagcgggagc cgtggggtcc gctgtacctg tgcctccgca gccgtacggc gccgccggcg ggggcgcgat ttgcgtgcct
aacgcggacg cgcacgcggt ggtcggggcg gacgcggcag cagcagcggc gccgacggtg atggtgggtt cgacagcgat
ggcgggtccg gcggcgtcgg ggaccgtgcc gcgcgccatg ctggtggtgc tgctggacga gctgggcgcc gtgttcgggt
actgcccgct ggacgggcac gtgtacccgc tggcggcgga gctgtcgcac tttctgcgcg cgggcgtgct gggcgcgctg
gcgctgggac gcgagtcggc gcccgccgcc gaggccgcgc ggcggctgct gcccgagctg gaccgcgagc
agtgggagcg gccgcgctgg gacgcgctgc acctgcaccc gcgcgccgcg ctgtgggcgc gcgagccgca
cgggcagtgg gagttcatgt ttcgcgaaca acgcggtgac cccataaatg atcccctcgc atttcgtctt tcggacgctc
gaactctcgg tctcgacctc accaccgtca tgacagagcg tcaaagtcaa ttgcccgaaa agtatatcgg tttctatcag
attaggaaac ctccttggct catggaacaa cctccacccc catctcgcca aaccaaaccg gacgctgcaa cgatgccccc
accgctcagt gctcaggcaa gcgtcagcta cgcgctccga tacgatgacg agtcctggcg cccgctcagc acagttgacg
accacaaagc ctggttggat ctcgacgaat cacattgggt cctcggggac agccgacccg acgatataaa acaacgcaga
ctgctgaagg ccactcaacg acgaggcgcc gaaatcgaca gacccatgcc tgtcgtgcct gaagaatgtt acgaccaacg
cttcactacc gaaggccacc aggtcatccc gttgtgcgcg tccgaacccg aggatgacga cgaagatcct acctacgacg
aattgccgtc gcgcccaccc cagaaacata agccgccaga caaacctccg cgcttatgca aaacgggccc cggcccacct
ccgctgccgc caaagcaacg gcacggttcc accgacggaa aagtttctgc gccccgacag tcggagcatc ataaaagaca
gacccgaccg ccaaggccgc caccgcccaa attcggggat agaaccgcgg cccatctctc gcaaaatatg cgggacatgt
acctcgatat gtgtacatct tcgggccaca ggccacggcc gccagcacct ccgcggccga aaaaatgtca aacacacgcc
cctcaccacg ttcatcattg a.
SEQ ID NO: 3 is a TRS-1 sequence derived from a human cytomegalovirus: ttattgagca
ttgtaatggt agtgtgtggc tatattagaa aacgtgacgc gtcgcatgtc gcggcacaat ctggcagcgg ggtcggggta
gggtacggtg ggaggcatgt acacagatgg aacaaaagca gaagtaacgt gagaaggagc atacagtcca gtatccagcg
gttcctgagt agcaccaccc atcaactgaa tgccctcatg agtaaaagtc tgcgggcgac agcccttggg gaccgttggc
atgggacgat caatctccaa accacagcgt aacaccgttt tcttccaacg tcgttgatag acgtcgtttt tacggttact
cccaagaacc cagaaagtct cgtccaagtc gtaccaggaa tcttctccgg ggagacgcga cggtttccaa tcctcgtcgt
ctcgtctcaa agcacgtccc aaactggctt gaggagtcaa cggtggttct gtgggtcggg tgtagcgcga gtgttttccc
ttcatgagcg attcatcctc cttgccttta ggctttttgg tctttttgtg tatcatctgg ccgccggcct ccataaccac cgtggccaag
tccagtccca gagcttgagc gtcggcgcgg cgtcgggcgt cttgcaggta gtcttccaca tttgcacaga tggccgggtg
tttggtggct agggtgagga cctcagcctc gccgcgaccc ggacgtagca aaaaagccaa ctgcccgtgc ggctcgcgcg
cccacagcgc ggcgcgcggg tgcaggtgca gcgcgtccca gcgcggccgc tcccactgct cgcggtccag ctcgggcagc
agccgccgcg cggcctcggc ggcgggcgcc gactcgcgtc ccagcgccag cgcgcccagc acgcccgcgc
gcagaaagtg cgacagctcc gccgccagcg ggtacacgtg cccgtccagc gggcagtacc cgaacacggc gcccagctcg
tccagcagca ccaccagcat ggcgcgcggc acggtccccg acgccgccgg acccgccatc gctgtcgaac ccaccatcac
cgtcggcgcc gctgctgctg ccgcgtccgc cccgaccacc gcgtgcgcgt ccgcgttagg cacgcaaatc gcgcccccgc
cggcggcgcc gtacggctgc ggaggcacag gtacagcgga ccccacggct cccgctatcg cgcacggcgc gtccccgccg
gcggcctccg tctccgtgcc gctcgccgct ggcggcgacg tcgtccccgc cgccgtcccc gtcgccggcc ccgccgcgca
gcccagccac cgcgcgggca gcaccgcgcc cagcgccagc cagccgcagc acagacgctg gttcaggtgc
cgacgcacgg ccgtcagcag cgacgcgggg tgcggcgccg acgcgaacgg ctcgtactgc gccagctcct gccacgcgcc
cagcagtacc atcggctgca gtcgcctgcc cggcgtctgc agcgccaccg tcgtgccggc ccaccgccgg cgcagctccc
gtccgagcgc cgtcgcctcc tcggcgcgca gcaacgtctg tcggagcgcc ggctgaggca gcagcgtcgc gcgcggggtg
cccacgccca gccggttgca gcggtacagc cgcaccacct cgcccgcgcc gtgccgaaac cactcgtccg cgtcgcgcgc
cgctaggatc agcgtgttgt ttgccaggtc gtacacgaac acgcggaacc cggcgcccag cgccaggtac agtccgtcct
gcgcgcacag accctcggga tggccggcct tgtcgcccaa cgtcgggtcg gctgcggggt ccacctcgtg caccacggta
gccaccagta cgatccacgc gtcccgcggc gacagttgac gcaggtccgt cgcgcccacg ccgttcatct ggctgcgcgg
cgtcacccgc gcgtagaatc cgtacggccg tccgagcggc agcagcgtgc ccgcgtcgcg ctgcgaccac ttgcgcatgg
cgcggcccgt gctgttggcc aaaaacgccg cgcgccacac ggcgcccatg gcctggtatt ccagctccgt cagcgcctgg
cgctccaccg gaatctgaga cagcaacagg cgctccgggc cgtgccaaaa gttgctattg ttgccgctac tcggaggggc
gcccggcggc ccgcggggtt ctacccggtg gacgccgtgg cccggcgtcg tcgtagccgc agcactcgca ccagtgcccg
ctgtggacgg cgctcccatc ggcacacaag aagaaggagg agaggaacca acccccgaag gccctccggc cccgcggccg
cgaccaaggg gcggggggcg cggcgacatg ccgttgcgct gggccat.
SEQ ID NO: 4 is a shared 130 amino acid region of IRS1 and TRS1 sequence derived from a
human cytomegalovirus: atggcccagc gcaacggcat gtcgccgcgc cccccgcccc ttggtcgcgg
ccgcggggcc ggagggcctt cgggggttgg ttcctctcct ccttcttctt gtgtgccgat gggagcgccg tccacagcgg
gcactggtgc gagtgctgcg gctacgacga cgccgggcca cggcgtccac cgggtagaac cccgcgggcc gccgggcgcc
cctccgagta gcggcaacaa tagcaacttt tggcacggcc cggagcgcct gttgctgtct cagattccgg tggagcgcca
ggcgctgacg gagctggaat accaggccat gggcgccgtg tggcgcgcgg cgtattggc caacagcacg ggccgcgcca
tgcgcaagtg gtcgcagcgc.

[0013] SEQ ID NO: 5 is “C170” from—HSV-C134, the Complete Viral Genome v1 Chimeric HSV expressing EphA2 Full-ML (C134+pCK1201), see FIG. 19D.

[0014] SEQ ID NO: 6 is >C171_from_—_HSV-C134_Complete_Viral_Genome_v1 Chimeric HSV expressing EphA2-Full-MLM (C154+pCK1200), see FIG. 19E.

[0015] SEQ ID NO: 7 is >C172_from_—_HSV-C134_Complete_Viral_Genome_v1 Chimeric HSV expressing EphA2-Ecto-ML (C154+pCK1205), see FIG. 19F.

[0016] SEQ ID NO: 8 is >C173_from_—_HSV-C134_Complete_Viral_Genome_v1 Chimeric HSV expressing EphA2-Ecto-MLM (C154+pCK1207), see FIG. 19G.

[0017] SEQ ID NO: 9 is >C174_from_—_HSV-C134_Complete_Viral_Genome_v1 Chimeric HSV expressing EphA2-Endo-ML (C154+pCK1210), see FIG. 19H.

[0018] SEQ ID NO: 10 is >C175_from_—_HSV-C134_Complete_Viral_Genome_v1 Chimeric HSV expressing EphA2 Endo-MLM (C154+pCK1212), see FIG. 19I.

SEQ ID NO: 11 is hEphA2 ML extracted sequence derived from a human sequence:
gcctatggga atgaaagacc ccacctgtag gtttggcaag ctaggatcaa ggtcaggaac agagaaacag gagaatatgg
gccaaacagg atatctgtgg taagcagttc ctgccccgct cagggccaag aacagttgga acaggagaat atgggccaaa
caggatatct gtggtaagca gttcctgccc cgctcagggc caagaacaga tggtccccag atgcggtccc gccctcagca
gtttctagag aaccatcaga tgtttccagg gtgccccaag gacctgaaat gaccctgtgccttatttgaa ctaaccaatc
agttcgcttc tcgcttctgt tcgcgcgctt ctgctccccg agctctatat aagcagagct ggtttagtga accgtcagat
cgcctggaga cgccatcca gctgattga cctccataga agacaccgac tctagctaga ggatctccta ggaagctggc
cgcacaaagt ggtaccggat cccgggtcga ccatggagct ccaggcagcc cgcgcctgct tcgccctgct gtggggctgt
gcgctggccg cggccgcggc ggcgcagggc aaggaagtgg tactgctgga ctttgctgca gctggagggg agctcggctg
gctcacacac ccgtatggca aagggtggga cctgatgcag aacatcatga atgacatgcc gatctacatg tactccgtgt
gcaacgtgat gtctggcgac caggacaact ggctccgcac caactgggtg taccgaggag aggctgagcg tatcttcatt
gagctcaagt ttactgtacg tgactgcaac agcttccctg gtggcgccag ctcctgcaag gagactttca acctctacta
tgccgagtcg gacctggact acggcaccaa cttccagaag cgcctgttca ccaagattga caccattgcg cccgatgaga
tcaccgtcag cagcgacttc gaggcacgcc acgtgaagct gaacgtggag gagcgctccg tggggccgct cacccgcaaa
ggcttctacc tggccttcca ggatatcggt gcctgtgtgg cgctgctctc cgtccgtgtc tactacaaga agtgccccga
gctgctgcag ggcctggccc acttccctga gaccatcgcc ggctctgatg caccttccct ggccactgtg gccggcacct
gtgtggacca tgccgtggtg ccaccggggg gtgaagagcc ccgtatgcac tgtgcagtgg atggcgagtg gctggtgccc
attgggcagt gcctgtgcca ggcaggctac gagaaggtgg aggatgcctg ccaggcctgc tcgcctggat tattaagtt
tgaggcatct gagagcccct gcttggagtg ccctgagcac acgctgccat cccctgaggg tgccacctcc tgcgagtgtg
aggaaggctt cttccgggca cctcaggacc cagcgtcgat gccttgcaca cgacccccct ccgccccaca ctacctcaca
gccgtgggca tgggtgccaa ggtggagctg cgctggacgc cccctcagga cagcgggggc cgcgaggaca ttgtctacag
cgtcacctgc gaacagtgct ggcccgagtc tggggaatgc gggccgtgtg aggccagtgt gcgctactcg gagcctcctc
acggactgac ccgcaccagt gtgacagtga gcgacctgga gccccacatg aactacacct tcaccgtgga ggcccgcaat
ggcgtctcag gcctggtaac cagccgcagc ttccgtactg ccagtgtcag catcaaccag acagagcccc ccaaggtgag
gctggagggc cgcagcacca cctcgcttag cgtctcctgg agcatccccc cgccgcagca gagccgagtg tggaagtacg
aggtcactta ccgcaagaag ggagactcca acagctacaa tgtgcgccgc accgagggtt tctccgtgac cctggacgac
ctggccccag acaccaccta cctggtccag gtgcaggcac tgacgcagga gggccagggg gccggcagca aggtgcacga
attccagacg ctgtccccgg agggatctgg caacttggcg gtgattggcg gcgtggctgt cggtgtggtc ctgcttctgg
tgctggcagg agttggcttc tttatccacc gcaggaggaa gaaccagcgt gcccgccagt ccccggagga cgtttacttc
tccaagtcag aacaactgaa gcccctgaag acatacgtgg acccccacac atatgaggac cccaaccagg ctgtgttgaa
gttcactacc gagatccatc catcctgtgt cactcggcag aaggtgatcg gagcaggaga gtttggggag gtgtacaagg
gcatgctgaa gacatcctcg gggaagaagg aggtgccggt ggccatcaag acgctgaaag ccggctacac agagaagcag
cgagtggact tcctcggcga ggccggcatc atgggccagt tcagccacca caacatcatc cgcctagagg gcgtcatctc
caaatacaag cccatgatga tcatcactga gtacatggag aatggggccc tggacaagtt ccttcgggag aaggatggcg
agttcagcgt gctgcagctg gtgggcatgc tgcggggcat cgcagctggc atgaagtacc tggccaacat gaactatgtg
caccgtgacc tggctgcccg caacatcctc gtcaacagca acctggtctg caaggtgtct gactttggcc tgtcccgcgt
gctggaggac gaccccgagg ccacctacac caccagtggc ggcaagatcc ccatccgctg gaccgccccg gaggccattt
cctaccggaa gttcacctct gccagcgacg tgtggagctt tggcattgtc atgtgggagg tgatgaccta tggcgagcgg
ccctactggg agttgtccaa ccacgaggtg atgaaagcca tcaatgatgg cttccggctc cccacaccca tggactgccc
ctccgccatc taccagctca tgatgcagtg ctggcagcag gagcgtgccc gccgccccaa gttcgctgac atcgtcagca
tcctggacaa gctcattcgt gcccctgact ccctcaagac cctggctgac tttgaccccc gcgtgtctat ccggctcccc
agcacgagcg gctcggaggg ggtgcccttc cgcacggtgt ccgagtggct ggagtccatc aagatgcagc agtatacgga
gcacttcatg gcggccggct acactgccat cgagaaggtg gtgcagatga ccaacgacga catcaagagg attggggtgc
ggctgcccgg ccaccagaag cgcatcgcct acagcctgct gggactcaag gaccaggtga acactgtggg gatccccatc
gggaattcag aacaaaaact catctcagaa gaagatctag gaggcggcgg gtcaggtgga ggtggctctg gcggtggcgg
ttaaaattcc gactcactat agggcgaatt aattccggag atctctagat ccggagagac gatggcagga gccgcgcata
tatacgcttg gagccagccc gccctcacag ggcgggccgc ctcgggggcg ggactggcca atcggcggcc gccagcgcgg
cggggcccgg ccaaccagcg tccgccgagt cttcggggcc cggcccattg ggcgggagtt accgcc
SEQ ID NO: 12 hEphA2 MLM extracted sequence derived from a human sequence:
gcctatggga atgaaagacc ccacctgtag gtttggcaag ctaggatcaa ggtcaggaac agagaaacag gagaatatgg
gccaaacagg atatctgtgg taagcagttc ctgccccgct cagggccaag aacagttgga acaggagaat atgggccaaa
caggatatct gtggtaagca gttcctgccc cgctcagggc caagaacaga tggtccccag atgcggtccc gccctcagca
gtttctagag aaccatcaga tgtttccagg gtgccccaag gacctgaaat gaccctgtgc cttatttgaa ctaaccaatc
agttcgcttc tcgcttctgt tcgcgcgctt ctgctccccg agctctatat aagcagagct ggtttagtga accgtcagat
cgcctggaga cgccatccac gctgattga cctccataga agacaccgac tctagctaga ggatctccta ggaagctggc
cgcacaaagt ggtaccggat cccgggtcga ccatggagct ccaggcagcc cgcgcctgct tcgccctgct gtggggctgt
gcgctggccg cggccgcggc ggcgcagggc aaggaagtgg tactgctgga ctttgctgca gctggagggg agctcggctg
gctcacacac ccgtatggca aagggtggga cctgatgcag aacatcatga atgacatgcc gatctacatg tactccgtgt
gcaacgtgat gtctggcgac caggacaact ggctccgcac caactgggtg taccgaggag aggctgagcg tatcttcatt
gagctcaagt ttactgtacg tgactgcaac agcttccctg gtggcgccag ctcctgcaag gagactttca acctctacta
tgccgagtcg gacctggact acggcaccaa cttccagaag cgcctgttca ccaagattga caccattgcg cccgatgaga
tcaccgtcag cagcgacttc gaggcacgcc acgtgaagct gaacgtggag gagcgctccg tggggccgct cacccgcaaa
ggcttctacc tggccttcca ggatatcggt gcctgtgtgg cgctgctctc cgtccgtgtc tactacaaga agtgccccga
gctgctgcag ggcctggccc acttccctga gaccatcgcc ggctctgatg caccttccct ggccactgtg gccggcacct
gtgtggacca tgccgtggtg ccaccggggg gtgaagagcc ccgtatgcac tgtgcagtgg atggcgagtg gctggtgccc
attgggcagt gcctgtgcca ggcaggctac gagaaggtgg aggatgcctg ccaggcctgc tcgcctggat tattaagtt
tgaggcatct gagagcccct gcttggagtg ccctgagcac acgctgccat cccctgaggg tgccacctcc tgcgagtgtg
aggaaggctt cttccgggca cctcaggacc cagcgtcgat gccttgcaca cgacccccct ccgccccaca ctacctcaca
gccgtgggca tgggtgccaa ggtggagctg cgctggacgc cccctcagga cagcgggggc cgcgaggaca ttgtctacag
cgtcacctgc gaacagtgct ggcccgagtc tggggaatgc gggccgtgtg aggccagtgt gcgctactcg gagcctcctc
acggactgac ccgcaccagt gtgacagtga gcgacctgga gccccacatg aactacacct tcaccgtgga ggcccgcaat
ggcgtctcag gcctggtaac cagccgcagc ttccgtactg ccagtgtcag catcaaccag acagagcccc ccaaggtgag
gctggagggc cgcagcacca cctcgcttag cgtctcctgg agcatccccc cgccgcagca gagccgagtg tggaagtacg
aggtcactta ccgcaagaag ggagactcca acagctacaa tgtgcgccgc accgagggtt tctccgtgac cctggacgac
ctggccccag acaccaccta cctggtccag gtgcaggcac tgacgcagga gggccagggg gccggcagca aggtgcacga
attccagacg ctgtccccgg agggatctgg caacttggcg gtgattggcg gcgtggctgt cggtgtggtc ctgcttctgg
tgctggcagg agttggcttc tttatccacc gcaggaggaa gaaccagcgt gcccgccagt ccccggagga cgtttacttc
tccaagtcag aacaactgaa gcccctgaag acatacgtgg acccccacac atatgaggac cccaaccagg ctgtgttgaa
gttcactacc gagatccatc catcctgtgt cactcggcag aaggtgatcg gagcaggaga gtttggggag gtgtacaagg
gcatgctgaa gacatcctcg gggaagaagg aggtgccggt ggccatcaag acgctgaaag ccggctacac agagaagcag
cgagtggact tcctcggcga ggccggcatc atgggccagt tcagccacca caacatcatc cgcctagagg gcgtcatctc
caaatacaag cccatgatga tcatcactga gtacatggag aatggggccc tggacaagtt ccttcgggag aaggatggcg
agttcagcgt gctgcagctg gtgggcatgc tgcggggcat cgcagctggc atgaagtacc tggccaacat gaactatgtg
caccgtgacc tggctgcccg caacatcctc gtcaacagca acctggtctg caaggtgtct gactttggcc tgtcccgcgt
gctggaggac gaccccgagg ccacctacac caccagtggc ggcaagatcc ccatccgctg gaccgccccg gaggccattt
cctaccggaa gttcacctct gccagcgacg tgtggagctt tggcattgtc atgtgggagg tgatgaccta tggcgagcgg
ccctactggg agttgtccaa ccacgaggtg atgaaagcca tcaatgatgg cttccggctc cccacaccca tggactgccc
ctccgccatc taccagctca tgatgcagtg ctggcagcag gagcgtgccc gccgccccaa gttcgctgac atcgtcagca
tcctggacaa gctcattcgt gcccctgact ccctcaagac cctggctgac tttgaccccc gcgtgtctat ccggctcccc
agcacgagcg gctcggaggg ggtgcccttc cgcacggtgt ccgagtggct ggagtccatc aagatgcagc agtatacgga
gcacttcatg gcggccggct acactgccat cgagaaggtg gtgcagatga ccaacgacga catcaagagg attggggtgc
ggctgcccgg ccaccagaag cgcatcgcct acagcctgct gggactcaag gaccaggtga acactgtggg gatccccatc
gggaattcag aacaaaaact catctcagaa gaagatggag gcggcgggtc aggtggaggt ggctctggcg gtggcggttc
ttgttggacg ctggatcggg ggtattgctc ctaattccga ctcactatag ggcgaattaa ttccggagat ctctagatcc
ggagagacga tggcaggagc cgcgcatata tacgcttgga gccagcccgc cctcacaggg cgggccgcct cgggggcggg
actggccaat cggcggccgc cagcgcggcg gggcccggcc aaccagcgtc cgccgagtct tcggggcccg gcccattggg
cgggagttac cgcc.
SEQ ID NO: 13 hEphA2 GPNMB target derived from a human sequence: 1 gcctatggga
atgaaagacc ccacctgtag gtttggcaag ctaggatcaa ggtcaggaac agagaaacag gagaatatgg gccaaacagg
atatctgtgg taagcagttc ctgccccgct cagggccaag aacagttgga acaggagaat atgggccaaa caggatatct
gtggtaagca gttcctgccc cgctcagggc caagaacaga tggtccccag atgcggtccc gccctcagca gtttctagag
aaccatcaga tgtttccagg gtgccccaag gacctgaaat gaccctgtgc cttatttgaa ctaaccaatc agttcgcttc
tcgcttctgt tcgcgcgctt ctgctccccg agctctatat aagcagagct ggtttagtga accgtcagat cgcctggaga
cgccatccac gctgttttga cctccataga agacaccgac tctagctaga ggatctccta ggaagctggc cgcacaaagt
ggtaccggat cccgggtcga ccatggagct ccaggcagcc cgcgcctgct tcgccctgct gtggggctgt gcgctggccg
cggccgcggc ggcggatact cttgtgacgc gttcgaattt ttcttttaag cagggcaagg aagtggtact gctggacttt
gctgcagctg gaggggagct cggctggctc acacacccgt atggcaaagg gtgggacctg atgcagaaca tcatgaatga
catgccgatc tacatgtact ccgtgtgcaa cgtgatgtct ggcgaccagg acaactggct ccgcaccaac tgggtgtacc
gaggagaggc tgagcgtatc ttcattgagc tcaagtttac tgtacgtgac tgcaacagct tccctggtgg cgccagctcc
tgcaaggaga ctttcaacct ctactatgcc gagtcggacc tggactacgg caccaacttc cagaagcgcc tgttcaccaa
gattgacacc attgcgcccg atgagatcac cgtcagcagc gacttcgagg cacgccacgt gaagctgaac gtggaggagc
gctccgtggg gccgctcacc cgcaaaggct tctacctggc cttccaggat atcggtgcct gtgtggcgct gctctccgtc
cgtgtctact acaagaagtg ccccgagctg ctgcagggcc tggcccactt ccctgagacc atcgccggct ctgatgcacc
ttccctggcc actgtggccg gcacctgtgt ggaccatgcc gtggtgccac cggggggtga agagccccgt atgcactgtg
cagtggatgg cgagtggctg gtgcccattg ggcagtgcct gtgccaggca ggctacgaga aggtggagga tgcctgccag
gcctgctcgc ctggattat taagtttgag gcatctgaga gcccctgctt ggagtgccct gagcacacgc tgccatcccc
tgagggtgcc acctcctgcg agtgtgagga aggcttcttc cgggcacctc aggacccagc gtcgatgcct tgcacacgac
ccccctccgc cccacactac ctcacagccg tgggcatggg tgccaaggtg gagctgcgct ggacgccccc tcaggacagc
gggggccgcg aggacattgt ctacagcgtc acctgcgaac agtgctggcc cgagtctggg gaatgcgggc cgtgtgaggc
cagtgtgcgc tactcggagc ctcctcacgg actgacccgc accagtgtga cagtgagcga cctggagccc cacatgaact
acaccttcac cgtggaggcc cgcaatggcg tctcaggcct ggtaaccagc cgcagcttcc gtactgccag tgtcagcatc
aaccagacag agccccccaa ggtgaggctg gagggccgca gcaccacctc gcttagcgtc tcctggagca tccccccgcc
gcagcagagc cgagtgtgga agtacgaggt cacttaccgc aagaagggag actccaacag ctacaatgtg cgccgcaccg
agggtttctc cgtgaccctg gacgacctgg ccccagacac cacctacctg gtccaggtgc aggcactgac gcaggagggc
cagggggccg gcagcaaggt gcacgaattc cagacgctgt ccccggaggg atctggcaac ttggcggtga ttggcggcgt
ggctgtcggt gtggtcctgc ttctggtgct ggcaggagtt ggcttcttta tccaccgcag gaggaagaac cagcgtgccc
gccagtcccc ggaggacgtt tacttctcca agtcagaaca actgaagccc ctgaagacat acgtggaccc ccacacatat
gaggacccca accaggctgt gttgaagttc actaccgaga tccatccatc ctgtgtcact cggcagaagg tgatcggagc
aggagagttt ggggaggtgt acaagggcat gctgaagaca tcctcgggga agaaggaggt gccggtggcc atcaagacgc
tgaaagccgg ctacacagag aagcagcgag tggacttcct cggcgaggcc ggcatcatgg gccagttcag ccaccacaac
atcatccgcc tagagggcgt catctccaaa tacaagccca tgatgatcat cactgagtac atggagaatg gggccctgga
caagttcctt cgggagaagg atggcgagtt cagcgtgctg cagctggtgg gcatgctgcg gggcatcgca gctggcatga
agtacctggc caacatgaac tatgtgcacc gtgacctggc tgcccgcaac atcctcgtca acagcaacct ggtctgcaag
gtgtctgact ttggcctgtc ccgcgtgctg gaggacgacc ccgaggccac ctacaccacc agtggcggca agatccccat
ccgctggacc gccccggagg ccatttccta ccggaagttc acctctgcca gcgacgtgtg gagctttggc attgtcatgt
gggaggtgat gacctatggc gagcggccct actgggagtt gtccaaccac gaggtgatga aagccatcaa tgatggcttc
cggctcccca cacccatgga ctgcccctcc gccatctacc agctcatgat gcagtgctgg cagcaggagc gtgcccgccg
ccccaagttc gctgacatcg tcagcatcct ggacaagctc attcgtgccc ctgactccct caagaccctg gctgactttg
acccccgcgt gtctatccgg ctccccagca cgagcggctc ggagggggtg cccttccgca cggtgtccga gtggctggag
tccatcaaga tgcagcagta tacggagcac ttcatggcgg ccggctacac tgccatcgag aaggtggtgc agatgaccaa
cgacgacatc aagaggattg gggtgcggct gcccggccac cagaagcgca tcgcctacag cctgctggga ctcaaggacc
aggtgaacac tgtggggatc cccatcggga attcagaaca aaaactcatc tcagaagaag atctaggagg cggcgggtca
ggtggaggtg gctctggcgg tggcggttaa aattccgact cactataggg cgaattaatt ccggagatct ctagatccgg
agagacgatg gcaggagccg cgcatatata cgcttggagc cagcccgccc tcacagggcg ggccgcctcg ggggcgggac
tggccaatcg gcggccgcca gcgcggcggg gcccggccaa ccagcgtccg ccgagtcttc ggggcccggc ccattgggcg
ggagttacc cc.

### BRIEF DESCRIPTION OF THE FIGURES

[0019] FIG. 1 provides a schematic representation showing EphA2 derivatives expressed from C134. (A) Configuration of the C134 oHSV, including IRS1 expression from the UL3/UL4 intergenic region, and deletion of γ₁34.5. The pCK1136 shuttle vector was used to insert an Egr1-driven GFP expression cassette into C134, designated C154 (B). (C-F) Murine EphA2 derivatives will be cloned into pCK1136 for recombination and replacement of GFP in C154. The wild type secretory leader sequence will be maintained and a C-terminal Myc tag will be utilized to distinguish endogenous from C134-expressed proteins. (C) Full-length EphA2. (D-F) Secreted truncation variants of EphA2, encompassing the extracellular (Ecto, D, E) or intracellular (Endo, F) EphA2 domains will be generated using the native leader sequence and deletion of the transmembrane domain. (E, F) Secreted EphA2 variants with a C-terminal DC-targeting domain.

[0020] FIGS. 2A and 2B provide graphs showing a composite of oHSV recovery and survival studies in A) U87 IC tumor model where C134 replicates 1000× greater than a Δγ₁34.5 virus (C101) and in a Neuro2A model B), where it has no replication advantage (Inserts: viral recovery at 48 hpi)

[0021] FIGS. 3A and 3B provide images showing C134 induced humoral and cell-mediated immunity. (A) Serum-based detection of humoral reactivity to DBT and Neuro2A cell lysates. Serum was collected from naive Balb/c mice, or Balb/c mice challenged with DBT tumors and treated with Saline, R3616, or C134. The serum was diluted 1:2048 and used as a primary for Western analysis. An excess of splenocytes isolated from the same animals were added to a confluent monolayer of DBT cells (10:1). After three days, cell expansion was compared to cells plated in the absence of DBT stimulation, and cell mediated cytotoxicity was visualized by May-Grunwald staining of the remaining DBT cells (B).

[0022] FIGS. 4A-4C provide graphs showing GPNMB-specific phage and fusion protein binding. (A) A GPNMB-specific consensus sequence was identified after 4 rounds of phage panning to GPNMB-Fc. GPNMB binding specificity of a phage clone (B), or a FcE engineered with a secretory leader and genetically fused to the GPNMB-binding consensus sequence (C) were added to a mixture of 293T and 293T-GPNMB cells. GPNMB expression and phage/secreted protein binding were assessed by flow cytometry.

[0023] FIGS. 5A and 5B provide graphs showing malignant glioma tumor lines can be divided based upon oHSV replication into sensitive and resistant cell lines. DBT tumors are highly resistant MG tumor cells. Analysis of tumor cell susceptibility to HSV infection (% HSV positive) and the absolute numbers of cells remaining (% relative cell count). MGs can be stratified into oHSV-sensitive and -resistant tumors based upon their susceptibility to viral cytolysis and shows that DBT tumor cells are highly oHSV resistant. B) Viral recovery studies from DBT CNS tumors show that C134 and R3616 replicate equivalently in these CNS tumors. Limiting plaque dilutions and qPCR of HSV DNA were performed from the oHSV treated mouse CNS tumors and show no difference in R3616 (first generation oHSV) and C134 (second generation oHSV) replication.

[0024] FIG. 6A and FIG. 6B provide graphs showing in vivo DBT tumor studies showing that mechanisms other than direct viral mediated cytolysis contribute to oHSV anti-tumor activity. Our previous studies show that C134 has improved direct oncolytic activity on oHSV sensitive tumors. However, some tumors (e.g., DBT, CT2A, GL261) are resistant to HSV replication and viral cytolytic activity. Orthotopic DBT tumor-bearing mice were treated with oHSV (1×10⁷ pfu) or saline. C134 significantly improved survival (p=0.003). R3616 a ICP34.5 (−) virus did not improve survival over saline treatment; nonetheless, a fraction (˜⅓) of the R3616 or C134 mice were long term survivors. (>37 d). Survivors were re-challenged with DBT tumors in another location (flank). Survivors had significantly slower tumor growth than naïve (tumor inexperienced) control mice suggesting that the anti-tumor immune response contributed to the long-term survival in these survivors.

[0025] FIG. 7 provides a graph showing that repeated C134 treatment extends survival. To identify if repeated dosing of C134 can extend survival, a Winn type assay was performed. In brief, Balb/C mice were implanted with oHSV-infected tumor cells (MOI 1) and then re-treated 8 days later (1×10⁷ pfu). The results show that similar to past studies the DBT tumors were rapidly fatal to mice treated with saline (median survival 14 d). In contrast, the C134 repeated dosing extended survival of the mice with DBT brain tumors (median survival 55 d compared to 33 d in the single dose study). A cohort was also treated with a C134-foreign antigen expressing virus (EGFP) to identify if foreign antigen expression from the virus improved the anti-tumor immune response. A control cohort was inoculated with mitomycin C treated tumor cells. Mito-C treated tumor cells do not replicate but remain viable exposing mice to tumor antigens (independent of oHSV treatment) for a subsequent study shown in FIG. 9.

[0026] FIGS. 8A and 8B provide a schematic and graph showing pro-inflammatory cytokine expression improves survival. A) Schematic of C002 a C134 based mIL-12 expressing oHSV. Treatment of Balb/C mice bearing orthotopic DBT tumors with 1×10⁷ pfu of C134 or C002 (C134+mIL-12) significantly improves survival over saline therapy. Expression of the T cell activating pro-inflammatory cytokine (IL-12) from C134 further extends C134 anti-tumor activity in the DBT syngeneic tumor model.

[0027] FIG. 9 provides a graph showing oHSV treatment stimulates an anti-tumor immune response superior to that seen in naïve mice or those who had prior tumor antigen exposure (Mito-C) and significantly reduced tumor growth in re-challenged mice.

[0028] FIG. 10A-C provides graphs showing HSV-immunity and its effect upon oHSV anti-tumor efficacy. We hypothesized that similar to pro-inflammatory cytokine expression, mice with pre-existing HSV immunity would exhibit enhanced T cell activity that would translate into an improved anti-tumor effect. To test this hypothesis, we immunized Balb/C cohorts with HSV (optiprep R3616 3.33×10⁶ pfu IM d21 and d7 prior to tumor implantation). We then implanted DBT tumors (1×10⁵ cells), and treated the HSV immune and HSV naïve cohorts with 1×10⁷ pfu of oHSV (C134 (FIG. 10B) or C002 (FIG. 10C)) or Saline 1 (FIG. 10A) week after tumor implantation (consistent with our previous studies). The results show that prior HSV immunity had no effect upon saline or C134 survival.

[0029] FIGS. 11A-11C provide composite images and schematics of C134 based tumor antigen expressing oHSVs. A) confocal microscopy shows cellular distribution of expressed EphA2 in cells (Myc tagged-EphA2, Trans-Golgi Network, DAPI-Nucleus). Full length EphA2 is membrane-associated, whereas the intracellular and extracellular domains distribute within the cell. B) Schematic of C170-C175, the C134 EphA2 tumor antigen expressing constructs including epitope domains at the 3′ end that enable us to identify the viral expressed antigen and direct it to antigen expressing cells. C) Immunostaining studies show that the oHSV-expressed full length and intracellular EphA2 domains remain cell associated (C170, C171, C174, and C175) whereas the oHSV-expressed EphA2 extracellular domain is secreted into the media (C172, C173).

[0030] FIGS. 12A-12D provide schematic representations and images showing EphA2 expressing virus construction and validation. (A) Schematic overview of antigen expressing virus—C170 and C172 were constructed by homologous recombination using a C134 based virus. This introduced the sequence encoding the full length C57bl6 EphA2 gene (C170) or Extracellular domain (C172) driven by the strong MND promoter into the g134.5 gene domain. (B) DNA hybridization studies confirmed the anticipated DNA fragment sizes distinct from the parent virus. (C). Immunofluorescence showed distinct cellular distribution characteristics (C170 membrane associated staining, C172 IC staining): Green color EphA2, Red staining of the Trans-golgi network, Blue color Nuclear staining with DAPI (D). Western blot of infected mouse glioma cells and supernatants shows that C170 expresses the anticipated 125 kd cell associated protein and C172 produces a 60 kd cell associated and secreted protein.

[0031] FIGS. 13A-D provide graphs showing viral Replication (FIGS. 13A and 13B) and Cytotoxicity (FIGS. 13C and 13D) in B6 murine glioma (CT2A) (FIGS. 13A and C) and MPNST (FIGS. 13B and D) (67C4) cells. (A). Viral Recovery studies show that C170 and C172 replicate similar to the parent virus (C134) in the murine tumor lines of interest. (B) Viral Cytotoxicity assay using incucyte and infection at an multiplicity of infection (PFU/Cell) of 1 shows that C134 and the C170 induce similar cytotoxicity and that the tumor lines exhibit differences in direct cellular cytotoxicity.

[0032] FIGS. 14A and 14B provide graphs showing in vivo testing of C170 in 2 different syngeneic tumor models. (A). C170 is the only virus tested that significantly improves survival in the CT2A orthotopic model. Top Panel shows a schematic of experimental design and virus treatment. Lower Panel shows Kaplan Meier curve showing improved median and overall survival following C170-treatment (B). C170 also significantly reduced tumor growth in the highly resistant murine 67C4 murine MPNST tumor model (Mann-Whitney analysis of unpaired samples, *p value<0.05, **p value<0.005 two-tailed analysis).

[0033] FIGS. 15A-15H provide graphs and images showing CT2A Brain tumor TIL Immunophenotyping: Analysis of CT2A Tumor infiltrating Leukocytes (TIL) after saline-perfusion —(A) Proportional Pie Chart Summary of overall TILs isolated from Saline (41,948), C134 (275,594), and C170 (273.174) treated mice at D6 post-injection and the relative lymphocyte (pink) and Myeloid (Black, Orange and Blue) composition. Numbers below pie chart represent absolute numbers of leukocytes/brain sample. (B) C170 significantly increases overall T cell infiltrates. (C) Both oHSVs (C134 and C170) increase CD4 populations, (D). C170 significantly increases CD8 T cytotoxic cells and (E) activated (CD25+) CD8 T cytotoxic cells. (F). Example of gating and representative flow plots for further CD8 phenotypic analysis for CD8-effector-like (CD44+, CD62L−) and central memory-like (CD44+, CD62L+) population analysis. (G). Both C134 and C170 increase CD8 T effector-like populations (CD44+, CD62L−), but only C170 increases the (H) CD8 central memory-like population at D6 post-treatment.

[0034] FIGS. 16A-16I provide graphs and images showing the immunophenotypic analysis of Saline and oHSV treated 67C4 flank tumors shows that (A) C170 significantly decreases the relative proportion of CD11b myeloid population in the tumor and (B) significantly decreases the immunosuppressive MDSC-like (CD11b+, GR1+) population when compared to saline or C134 treated samples. C170 treatment significantly increases the (CD8+, CD44+, CD62L+) central memory-like population within the tumor similar to our brain tumor model results. In addition to TIL changes, C170 treatment also has effects on the peripheral populations (D) Representative example of initial T cell (CD90+) and Myeloid (CD11b+) population gating. C170 treatment reduces (E) CD11b (+) cells and (F) CD11b+, GR1+ MDSC-like populations in the periphery. C170 does not significantly increase the (G) T cell or (H) CD4(+) T cell proportions but it does increases (I) the CD8 T cell population in the periphery.

[0035] FIGS. 17A and 17B provides a scheme and graph showing abscopal effects and immune memory against the tumor. C170-treated brain tumor survivors suppress CT2A tumor re-growth better than naïve (mice never exposed to tumor) or C134-treated survivors upon CT2A flank tumor re-challenge. (A) Experimental design schematic shown (B) tumor growth curves show significant decrease in tumor growth after CT2A implantation in the flanks of naïve or oHSV treated long-term survivors.

[0036] FIGS. 18A-18F provide a summary of T cell function studies from Saline and oHSV treated mice shows that C170 treatment induces an antigen specific T cell response in the periphery of long term survivors. Splenocytes from Saline (Blue columns) or oHSV-treated mice (red column C134, Green Column C170) were analyzed. At the start there was no difference in the populations used peptide pulsing; however, after pulsing with 10 um EphA2 or 10 uM OVA peptide (negative control), C170-treated mice significantly increase their activated (B) CD25(+), (C) GZMB (+), and (D) CD25+, GZMB+ dual staining CD8+ populations indicative of an EphA2 specific population response. (E) Representative flow plot shown of the CD8(+) GZMB (+) population and gating and the (F) GZMB CD25 dual positive gating populations.

[0037] FIGS. 19A-19I provide schematic representations of exemplary chimeric oncolytic viruses described herein (FIGS. 19A-19C) and the entire viral genomic sequence for C170 (FIG. 19D), C171 (FIG. 19E), C172 (FIG. 19F), C173 (FIG. 19G). C174 (FIG. 19H), and C175 (FIG. 19I).

### DETAILED DESCRIPTION

[0038] The present invention provides a chimeric oncolytic virus that includes a herpesvirus having a modified nucleic acid sequence, including a modification of the herpesvirus gamma (1)34.5 gene (γ₁34.5) or a nucleic acid with at least about 70% homology to the γ134.5 gene that reduces its expression; a second viral nucleic acid sequence encoding a PKR evasion protein that does not cause virulence; and a third nucleic acid sequence encoding a tumor-associated antigen. Methods of using the chimeric oncolytic virus to treat subjects having cancer, or to vaccinate subjects at risk of developing cancer, are also described.

[0039] Unless otherwise defined, all technical and scientific terms used herein have the same meaning as commonly understood by one of ordinary skill in the art to which this invention belongs. The terminology used in the description of the invention herein is for describing particular embodiments only and is not intended to be limiting of the invention. All publications, patent applications, patents, and other references mentioned herein are incorporated by reference in their entirety.

[0040] Where a range of values is provided, it is understood that each intervening value, to the tenth of the unit of the lower limit unless the context clearly dictates otherwise, between the upper and lower limit of that range and any other stated or intervening value in that stated range, is encompassed within the invention. The upper and lower limits of these smaller ranges may independently be included in the smaller ranges, and are also encompassed within the invention, subject to any specifically excluded limit in the stated range. Where the stated range includes one or both of the limits, ranges excluding either or both of those included limits are also included in the invention.

[0041] As used herein and in the appended claims, the singular forms “a”, “and”, and “the” include plural referents unless the context clearly dictates otherwise. Thus, for example, reference to “a sample” also includes a plurality of such samples and reference to “the splicing regulator protein” includes reference to one or more protein molecules, and so forth.

[0042] As used herein, the term “about” refers to +/−10% deviation from the basic value.

[0043] As used herein the term “nucleic acid” or “oligonucleotide” refers to multiple nucleotides (i.e. molecules comprising a sugar (e.g. ribose or deoxyribose) linked to a phosphate group and to an exchangeable organic base, which is either a substituted pyrimidine (e.g. cytosine (C), thymidine (T) or uracil (U)) or a substituted purine (e.g. adenine (A) or guanine (G)). The term shall also include polynucleosides (i.e. a polynucleotide minus the phosphate) and any other organic base containing polymer. Purines and pyrimidines include but are not limited to adenine, cytosine, guanine, thymidine, inosine, 5-methylcytosine, 2-aminopurine, 2-amino-6-chloropurine, 2,6-diaminopurine, hypoxanthine, and other naturally and non-naturally occurring nucleobases, substituted and unsubstituted aromatic moieties. Natural nucleic acids have a deoxyribose- or ribose-phosphate backbone. An artificial or synthetic polynucleotide is any polynucleotide that is polymerized in vitro or in a cell free system and contains the same or similar bases but may contain a backbone of a type other than the natural ribose-phosphate backbone. These backbones include: PNAs (peptide nucleic acids), phosphorothioates, phosphorodiamidates, morpholinos, and other variants of the phosphate backbone of native nucleic acids. Other such modifications are well known to those of skill in the art. Thus, the term nucleic acid also encompasses nucleic acids with substitutions or modifications, such as in the bases and/or sugars.

[0044] The term “base” encompasses any of the known base analogs of DNA and RNA. Bases include purines and pyrimidines, which further include the natural compounds adenine, thymine, guanine, cytosine, uracil, inosine, and natural analogs. Synthetic derivatives of purines and pyrimidines include, but are not limited to, modifications which place new reactive groups such as, but not limited to, amines, alcohols, thiols, carboxylates, and alkylhalides.

[0045] “Peptide” and “polypeptide” are used interchangeably herein and refer to a compound made up of a chain of amino acid residues linked by peptide bonds. An “active portion” of a polypeptide means a peptide that is less than the full length polypeptide, but which retains measurable biological activity and retains biological detection.

[0046] As used herein, the term “tumor” refers to any neoplastic growth, proliferation or cell mass whether benign or malignant (cancerous), whether a primary site lesion or metastases.

[0047] As used herein “therapeutically effective amount” refers to an amount of a composition that relieves (to some extent, as judged by a skilled medical practitioner) one or more symptoms of the disease or condition in a mammal. Additionally, by “therapeutically effective amount” of a composition is meant an amount that returns to normal, either partially or completely, physiological or biochemical parameters associated with or causative of a disease or condition. A clinician skilled in the art can determine the therapeutically effective amount of a composition in order to treat or prevent a particular disease condition, or disorder when it is administered, such as intravenously, subcutaneously, intraperitoneally, orally, or through inhalation. The precise amount of the composition required to be therapeutically effective will depend upon numerous factors, e.g., such as the specific activity of the active agent, the delivery device employed, physical characteristics of the agent, purpose for the administration, in addition to many patient specific considerations. But a determination of a therapeutically effective amount is within the skill of an ordinarily skilled clinician upon the appreciation of the disclosure set forth herein.

[0048] Treat”, “treating”, and “treatment”, etc., as used herein, refer to any action providing a benefit to a patient at risk for or afflicted with a disease, including improvement in the condition through lessening or suppression of at least one symptom, delay in progression of the disease, prevention or delay in the onset of the disease, etc. Treatment also includes partial or total destruction of the undesirable proliferating cells with minimal destructive effects on normal cells. A subject at risk is a subject who has been determined to have an above-average risk that a subject will develop cancer, which can be determined, for example, through family history or the detection of genes causing a predisposition to developing cancer.

[0049] The term “subject,” as used herein, refers to a species of mammal, including, but not limited to, primates, including simians and humans, equines (e.g., horses), canines (e.g., dogs), felines, various domesticated livestock (e.g., ungulates, such as swine, pigs, goats, sheep, and the like), as well as domesticated pets and animals maintained in zoos.

[0050] An “oncolytic virus” refers to a virus that preferentially infects and kills cancer cells. The infected cancer cells are destroyed by oncolysis, leading to the release of new infectious virus particles that go on to infect other cancer cells.

[0051] A “chimeric virus,” refers to a virus comprising nucleic acid sequences from different viruses. For example, a chimeric virus can be a virus including nucleic acid material from a herpesvirus and a cytomegalovirus.

[0052] Unless defined otherwise, all technical and scientific terms used herein have the same meaning as commonly understood by one of ordinary skill in the art to which this invention belongs.

### Chimeric Oncolytic Viruses

[0053] In one aspect, the invention provides chimeric oncolytic virus, comprising a herpesvirus having a modified nucleic acid sequence, comprising a modification of the herpesvirus gamma (1)34.5 gene (γ₁34.5) or a nucleic acid with at least about 70% homology to the γ₁34.5 gene that reduces its expression; a second viral nucleic acid sequence encoding a PKR evasion protein that does not cause virulence; and a third nucleic acid sequence encoding a tumor-associated antigen.

[0054] Selective replication of these HSV recombinants in tumors can be achieved by deletion of the viral neurovirulence gene, γ₁34.5. Deletion of the HSV-1 neurovirulence gene allows the safe administration of these oncolytic viruses. Although Δγ₁34.5 viruses are capable of entry into non-dividing normal cells, these viruses cannot replicate efficiently except in actively dividing cells such as tumor cells. Chou et al., Science 250(4985): 1262-6 (1990). Therefore such viruses are tumor-selective viruses. Δγ₁34.5 viruses have shown significant efficacy for therapy of brain malignancies in preclinical animal models, and have been demonstrated to be safe in Phase I and II trails in both the U.S. (Markert et al., Gene Ther. 7(10): 867-74 (2000)) and Great Britain (Rampling et al., Gene Ther. 7(10): 859-66 (2000)). However, attenuated HSV-1 (Δγ₁34.5) recombinants are unable to efficiently synthesize viral proteins and this limits viral replication. Shah et al., J. Neurooncol. 65(3): 203-26 (2003). However, inclusion of a PKR evasion gene that inhibits PKR-mediated protein shutoff without neurovirulence.

[0055] The chimeric oncolytic virus includes a modification of the herpesvirus gamma (1)34.5 gene (γ₁34.5) or a nucleic acid with at least about 70% homology to the γ₁34.5 gene that reduces its expression. Modifications that can be made to the γ₁34.5 gene include one or more mutations, deletions, insertions and substitutions. Thus, the modification to the herpesvirus nucleic acid sequence can comprise the complete or partial deletion of the γ₁34.5 gene (SEQ ID NO: 1) from HSV-1. The modification can comprise an inserted exogenous stop codon or other nucleotide or nucleotides. The modification can comprise the mutation or deletion of the promoter or the insertion of an exogenous promoter that alters expression of the γ₁34.5 gene. The modification can comprise one or more inserted nucleotides that results in a codon frame-shift. Furthermore, the second viral nucleic acid sequence of the chimera could be substituted for the γ₁34.5 gene. The modification to the γ₁34.5 gene can also be a modification of a nucleic acid with at least about 70-99% homology, including 70%, 75%, 80%, 85%, 90%, or 95% homology, to the γ₁34.5 gene. In some embodiments, modification of the herpesvirus γ₁34.5 gene comprises a deletion or mutation of the γ₁34.5 gene. Methods for making the modifications described herein are well known to those skilled in the art.

[0056] The chimeric oncolytic viruses of the present invention are based on the Herpesvirus. Genetically modified herpesvirus are attractive as oncolytic vectors for a number of reasons: 1) procedures for constructing recombinant herpesvirus are well established; 2) multiple genes can be deleted and/or replaced with therapeutic foreign genes without affecting the replication capacity of the virus; 3) considerable experience with the biology of herpesvirus and its behavior in humans and nonhuman primates exists in the literature; and 4) modified herpesviruses can be engineered to retain sensitivity to standard antiviral drug therapy as a “built-in” safety feature. Furthermore, the genome size of the Herpes Simplex Virus, 152 kb, allows transfer of genes 30 kb or more in size.

[0057] There are more than 120 animal herpesviruses. All herpesviruses are divided into three subsets: the alpha (a), beta (P) and gamma (γ) herpesviruses. There are 8 human herpesviruses, which are split between the three subsets. Alpha Herpesviruses include Herpes Simplex Virus 1 (HSV-1), HSV-2, and Varicella Zoster Virus (VZV). Beta Herpesviruses include Human Cytomegalovirus (HCMV), Human Herpesvirus 6 (HHV-6), and Human Herpesvirus 7 (HHV-7). Gamma Herpesvirus include Epstein Barr Virus (EBV) and Gamma Kaposi's Sarcoma Herpesvirus. Accordingly, in some embodiments the herpesvirus included in the chimeric oncolytic virus is an α herpesvirus, while in further embodiments the herpesvirus included in the chimeric oncolytic virus is an HSV-1 herpesvirus.

[0058] The chimeric oncolytic virus comprises a modification of the herpesvirus gamma (1)34.5 gene (γ₁34.5) or a nucleic acid with at least about 70% homology to the γ₁34.5 gene that reduces its expression and a second viral nucleic acid sequence encoding a PKR evasion protein that does not cause virulence. The herpesvirus nucleic acid modification causes reduced expression of a protein kinase R (PKR) evasion gene as compared to expression of the evasion gene in the absence of the modification. The second viral sequence encodes a protein that comprises the protein synthesis function of the PKR evasion gene without the neurovirulence function of the gene. Therefore, the chimeric virus has a reduced neurovirulence as compared to a wild-type herpesvirus. Also as disclosed herein, the provided chimeric virus has enhanced protein synthesis and/or replication as compared to existing attenuated herpesviruses, such as, for example, Δγ₁34.5 HSV. The second nucleic acid sequence of the provided chimeric virus enhances protein synthesis or replication as compared to the protein synthesis or replication of the chimeric virus in the absence of the second viral nucleic acid sequence. The second nucleic acid sequence of the provided chimeric virus can enhance protein synthesis and replication by inhibiting the activation of PKR, inhibiting the phosphorylation of eIF-2α, or enhancing the dephosphorylation of eIF-2α.

[0059] The second viral nucleic acid sequence of the chimeric oncolytic virus comprises one phenotype of the PKR evasion gene, protein synthesis and replication in infected tumor cells, but not the other phenotype of the PKR evasion gene, PKR-mediated virulence, e.g., neurovirulence. In other words, the second viral nucleic acid sequence inhibits PKR-mediated protein shutoff without neurovirulence. Thus, the second viral nucleic acid sequence can be any PKR evasion gene or comparable gene that does not cause virulence. The second viral nucleic acid sequence can be derived from homologous viruses. Thus, the second viral nucleic acid sequence of the provided chimeric virus can be an α herpesvirus nucleic acid sequence, P herpesvirus nucleic acid sequence, or γ herpesvirus nucleic acid sequence. Thus, the viral nucleic acid sequence of the provided chimeric virus can be a cytomegalovirus (CMV) nucleic acid sequence.

[0060] Examples of suitable nucleic acid sequences that can be used in the provided chimeric virus include, but are not limited to, IRS-1 (SEQ ID NO: 2) and TRS-1 (SEQ ID NO: 3), or homologous genes thereof. The provided chimeric virus can comprise an IRS-1 gene. The provided chimeric virus can also comprise a nucleic acid having at least about 70-99% homology, including about 70%, 75%, 80%, 85%, 90%, 95% homology to the IRS-1 gene. The provided chimeric virus can comprise a TRS-1 gene, or homologous genes thereof. The provided chimeric virus can also comprises a nucleic acid having at least about 70-99% homology, including about 70%, 75%, 80%, 85%, 90%, 95% homology, to the TRS-1 gene.

[0061] Human cytomegalovirus (HCMV) IRS1 and TRS1 proteins have a shared 130 amino acid (aa) region that independently interacts with two eukaryotic genes, Nedd4 and TSG101, involved in vesicular transport and lysosomal sorting in the cell. As described in the examples below a chimeric virus comprising either TRS1 or IRS1 have a similar protein synthesis phenotype. Thus, the provided chimeric virus can comprise the nucleic acid sequence that corresponds to the shared 130 aa region of IRS1 and TRS1 (SEQ ID NO: 4). The provided chimeric virus can also comprise a nucleic acid having at least about 70-99% homology, including about 70%, 75%, 80%, 85%, 90%, 95% homology to SEQ ID NO:4.

[0062] It is understood that as discussed herein the use of the terms homology and identity mean the same thing as similarity. Thus, for example, if the use of the word homology is used between two non-natural sequences it is understood that this is not necessarily indicating an evolutionary relationship between these two sequences, but rather is looking at the similarity or relatedness between their nucleic acid sequences. Many of the methods for determining homology between two evolutionarily related molecules are routinely applied to any two or more nucleic acids or proteins for the purpose of measuring sequence similarity regardless of whether they are evolutionarily related.

[0063] In general, it is understood that one way to define any known variants and derivatives or those that might arise, of the disclosed genes and proteins herein, is through defining the variants and derivatives in terms of homology to specific known sequences. This identity of particular sequences disclosed herein is also discussed elsewhere herein. In general, variants of genes and proteins herein disclosed typically have at least, about 70, 71, 72, 73, 74, 75, 76, 77, 78, 79, 80, 81, 82, 83, 84, 85, 86, 87, 88, 89, 90, 91, 92, 93, 94, 95, 96, 97, 98, or 99 percent homology to the stated sequence or the native sequence. Those of skill in the art readily understand how to determine the homology of two proteins or nucleic acids, such as genes. For example, the homology can be calculated after aligning the two sequences so that the homology is at its highest level.

[0064] Another way of calculating homology can be performed by published algorithms. Optimal alignment of sequences for comparison may be conducted by the local homology algorithm of Smith and Waterman, Adv. Appl. Math. 2: 482 (1981), by the homology alignment algorithm of Needleman and Wunsch, J. Mol. Biol. 48: 443 (1970), by the search for similarity method of Pearson and Lipman, Proc. Natl. Acad. Sci. U.S.A. 85:2444 (1988), by computerized implementations of these algorithms (GAP, BESTFIT, FASTA, and TFASTA in the Wisconsin Genetics Software Package, Genetics Computer Group, 575 Science Dr., Madison, Wis.), or by inspection.

[0065] The same types of homology can be obtained for nucleic acids by, for example, the algorithms disclosed in Zuker, M. Science 244:48-52, 1989, Jaeger et al. Proc. Natl. Acad. Sci. USA 86:7706-7710, 1989, Jaeger et al. Methods Enzymol. 183:281-306, 1989, which are herein incorporated by reference for at least the material related to nucleic acid alignment. It is understood that any of the methods typically can be used and that, in certain instances, the results of these various methods may differ, but the skilled artisan understands if identity is found with at least one of these methods, the sequences would be said to have the stated identity, and be disclosed herein.

[0066] For example, as used herein, a sequence recited as having a particular percent homology to another sequence refers to sequences that have the recited homology as calculated by any one or more of the methods described above. For example, a first sequence has 80 percent homology, as defined herein, to a second sequence if the first sequence is calculated to have 80 percent homology to the second sequence using the Zuker calculation method even if the first sequence does not have 80 percent homology to the second sequence as calculated by any of the other calculation methods. As another example, a first sequence has 80 percent homology, as defined herein, to a second sequence if the first sequence is calculated to have 80 percent homology to the second sequence using both the Zuker calculation method and the Pearson and Lipman calculation method, even if the first sequence does not have 80 percent homology to the second sequence as calculated by the Smith and Waterman calculation method, the Needleman and Wunsch calculation method, the Jaeger calculation methods, or any of the other calculation methods. As yet another example, a first sequence has 80 percent homology, as defined herein, to a second sequence if the first sequence is calculated to have 80 percent homology to the second sequence using each of the calculation methods, although, in practice, the different calculation methods will often result in different calculated homology percentages.

[0067] The disclosed nucleic acids may contain, for example, nucleotide analogs or nucleotide substitutes. Non-limiting examples of these and other molecules are discussed herein. It is understood that, for example, when a vector is expressed in a cell, the expressed mRNA will typically be made up of A, C, G, and U.

[0068] A nucleotide analog is a nucleotide which contains some type of modification of either the base, sugar, or phosphate moieties. Modifications to nucleotides are well known in the art and include for example, 5-methylcytosine (5-me-C), 5-hydroxymethyl cytosine, xanthine, hypoxanthine, and 2-aminoadenine.

[0069] Also provided herein is a viral vector comprising the herein disclosed chimeric oncolytic virus, wherein the chimeric oncolytic virus further comprises a tumor-associated antigen. Thus, a method of delivering a tumor-associated antigen to a cell is provided, comprising contacting the target cell with the herein provided viral vector. The delivery can be in vivo or ex vivo. The chimeric oncolytic virus of a viral vector can include a gene encoding a modified HSV glycoprotein required for virus entry. Recombinant HSV have been constructed that exclusively enter tumor cells through tumor-specific receptors. Zhou and Roizman, J. Virol. 79(9): 5272-7 (2005).

[0070] Nucleic acids, such as the ones described herein, that are delivered to cells typically contain expression controlling systems. For example, the inserted genes in viral and retroviral systems usually contain promoters and/or enhancers to help control the expression of the desired gene product. A promoter is generally a sequence or sequences of DNA that function when in a relatively fixed location in regard to the transcription start site. A promoter contains core elements required for basic interaction of RNA polymerase and transcription factors, and may contain upstream elements and response elements.

[0071] Preferred promoters controlling transcription from vectors in mammalian host cells may be obtained from various sources, for example, the genomes of viruses such as polyoma, Simian Virus 40 (SV40), adenovirus, retroviruses, hepatitis-B virus and most preferably cytomegalovirus, or from heterologous mammalian promoters, e.g., beta actin promoter. The early and late promoters of the SV40 virus are conveniently obtained as an SV40 restriction fragment which also contains the SV40 viral origin of replication (Fiers et al., Nature, 273: 113 (1978)). The immediate early promoter of the human cytomegalovirus is conveniently obtained as a HindIII E restriction fragment (Greenway, P. J. et al., Gene 18: 355-360 (1982)). Of course, promoters from the host cell or related species also are useful herein.

[0072] Enhancer generally refers to a sequence of DNA that functions at no fixed distance from the transcription start site and can be either 5′ or 3′ to the transcription unit. Furthermore, enhancers can be within an intron as well as within the coding sequence itself. They are usually between 10 and 300 base pairs (bp) in length, and they function in cis. Enhancers function to increase transcription from nearby promoters. Enhancers also often contain response elements that mediate the regulation of transcription. Promoters can also contain response elements that mediate the regulation of transcription. Enhancers often determine the regulation of expression of a gene. While many enhancer sequences are now known from mammalian genes (globin, elastase, albumin, ax-fetoprotein and insulin), typically one will use an enhancer from a eukaryotic cell virus for general expression. Preferred examples include, but are not limited to, the SV40 enhancer, the cytomegalovirus early promoter enhancer, the polyoma enhancer, and adenovirus enhancers.

[0073] The promoter and/or enhancer may be specifically activated either by light or specific chemical events which trigger their function. Systems can be regulated by reagents such as tetracycline and dexamethasone. There are also ways to enhance viral vector gene expression by exposure to irradiation, such as gamma irradiation, or alkylating drugs.

[0074] The promoter region can act as a constitutive promoter to maximize expression of the region of the transcription unit to be transcribed. In certain constructs, the promoter region can be active in all eukaryotic cell types, even if it is only expressed in a particular type of cell at a particular time. A preferred promoter of this type is the CMV promoter (650 bases). Other preferred promoters are SV40 promoters, cytomegalovirus (full length promoter), and retroviral vector LTR. It has been shown that all specific regulatory elements can be cloned and used to construct expression vectors that are selectively expressed in specific cell types such as melanoma cells. For example, the glial fibrillary acidic protein (GFAP) promoter has been used to selectively express genes in cells of glial origin. Such tumor specific promoters can also be incorporated into the chimeric viruses as well as the viral vectors described herein.

[0075] Expression vectors used in eukaryotic host cells may also contain sequences necessary for the termination of transcription which may affect mRNA expression. These regions are transcribed as polyadenylated segments in the untranslated portion of the mRNA encoding tissue factor protein. The 3′ untranslated regions also include transcription termination sites. It is preferred that the transcription unit also contain a polyadenylation region. One benefit of this region is that it increases the likelihood that the transcribed unit will be processed and transported like mRNA. The identification and use of polyadenylation signals in expression constructs are well established. It is preferred that homologous polyadenylation signals be used in the transgene constructs. In certain transcription units, the polyadenylation region is derived from the SV40 early polyadenylation signal and consists of about 400 bases. It is also preferred that the transcribed units contain other standard sequences, alone or in combination with the above sequences, to improve expression from, or stability of, the construct.

[0076] Viral vectors can include a nucleic acid sequence encoding a marker product. This marker product is used to determine if the gene has been delivered to the cell and once delivered is being expressed. Marker genes include, for example, the E. Coli lacZ gene, which encodes β-galactosidase, and green fluorescent protein (GFP). Markers can also be used in imaging techniques. Thus, a chimeric vector that encodes a marker could be used to visualize a cancer cell or tumor. The size of the marked region or the intensity of the marker can be used to evaluate the progression, regression, or cure of cancer, for example.

[0077] As used herein a “marker” means any detectable tag that can be attached directly (e.g., a fluorescent molecule integrated into a polypeptide or nucleic acid) or indirectly (e.g., by way of activation or binding to an expressed genetic reporter, including activatable substrates, peptides, receptor fusion proteins, primary antibody, or a secondary antibody with an integrated tag) to the molecule of interest. A “marker” is any tag that can be visualized with imaging methods. The detectable tag can be a radio-opaque substance, radiolabel, a fluorescent label, a light emitting protein, a magnetic label, or microbubbles (air filled bubbles of uniform size that remain in the circulatory system and are detectable by ultrasonography, as described in Ellega et al. Circulation, 108:336-341, 2003, which is herein incorporated in its entirety). The detectable tag can be selected from the group consisting of gamma-emitters, beta-emitters, and alpha-emitters, positron-emitters, X-ray emitters, ultrasound reflectors (microbubbles), and fluorescence-emitters suitable for localization. Suitable fluorescent compounds include fluorescein sodium, fluorescein isothiocyanate, phycoerythrin, Green Fluorescent Protein (GFP), Red Fluorescent Protein (RFP), Texas Red sulfonyl chloride (de Belder & Wik, Carbohydr. Res. 44(2):251-57 (1975)), as well as compounds that are fluorescent in the near infrared such as Cy5.5, Cy7, and others. Also included are genetic reporters detectable following administration of radiotracers such as hSSTr2, thymidine kinase (from herpes virus, human mitochondria, or other) and NIS (sodium/iodide symporter). Light emitting proteins include various types of luciferase. Those skilled in the art will know, or will be able to ascertain with no more than routine experimentation, other fluorescent compounds that are suitable for labeling the molecule.

[0078] In vivo monitoring can be carried out using, for example, bioluminescence imaging, planar gamma camera imaging, SPECT imaging, light-based imaging, magnetic resonance imaging and spectroscopy, fluorescence imaging (especially in the near infrared), diffuse optical tomography, ultrasonography (including untargeted microbubble contrast, and targeted microbubble contrast), PET imaging, fluorescence correlation spectroscopy, in vivo two-photon microscopy, optical coherence tomography, speckle microscopy, small molecule reporters, nanocrystal labeling and second harmonic imaging. Using the aforementioned imaging technologies, reporter genes under control of various inflammation specific promoters are detected following specific induction.

[0079] These technologies can be applied in combination with other imaging technologies. For example, tumor mass monitoring can be accomplished using tumor cells positive for CMV-luciferase. In addition, two luciferase enzymes can be imaged at the same time, for example, using CMV-luciferase (from firefly) and cox2L-luciferase (from Renilla). Other reporters and promoters can be used in conjunction with these examples, some examples of which are disclosed above.

### Tumor-Associated Antigens

[0080] The chimeric oncolytic virus includes a third nucleic acid sequence encoding a tumor-associated antigen. As used herein, a “tumor-associated antigen” comprises any antigen produced by a tumor cell. A “tumor-associated antigen” can be an antigen present only in a tumor cell and not on any other cell, or it may be an antigen present in some tumor cells and also in some normal cells. Tumor-associated antigens can include, for example, products of mutated oncogenes and tumor suppressor genes, overexpressed or aberrantly expressed cellular proteins, tumor antigens produced by oncogenic viruses, oncofetal antigens, altered cell surface glycolipids and glycoproteins or cell-type specific differentiation antigens.

[0081] In some embodiments, the chimeric oncolytic virus is capable of expressing a plurality of different tumor-associated antigens. For example, in some embodiments, the herpesvirus includes a fourth nucleic acid sequence encoding a different tumor-associated antigen from that encoded by the third nucleic acid sequence.

[0082] Various antigens (e.g., tumor-associated antigens, microbial antigens) or antigenic portions thereof can be selected for use as antigens of interest from among those antigens known in the art or determined by immunoassay to be able to bind to antibody or MHC molecules (antigenicity) or generate an immune response (immunogenicity) as described above. Additional, useful antigens or derivatives thereof can also be identified by various criteria, such as the antigen's involvement in cancer, (Norrby (1985) Vaccines 85, Lerner, et al. (eds.), Cold Spring Harbor Laboratory, Cold Spring Harbor, N.Y., pp. 388-389), type or group specificity, recognition by patients' antisera or immune cells, and/or the demonstration of protective effects of antisera or immune cells specific for the antigen.

[0083] While any antigen of interest can be employed in the methods and compositions provided herein, non-limiting examples include tumor-associated antigens or antigenic portions thereof that are associated with, derived from, or predicted to be associated with a cancer. In such instances the tumor-associated antigen of interest can be from any type of cancer, including, but not limited to, adenocarcinoma, hepatoblastoma, sarcoma, glioma, glioblastoma, neuroblastoma, plasmacytoma, histiocytoma, melanoma, adenoma, myeloma, bladder cancer, brain cancer, squamous cell carcinoma of the head and neck, ovarian cancer, skin cancer, liver cancer, lung cancer, colon cancer, cervical cancer, breast cancer, renal cancer, esophageal carcinoma, head and neck carcinoma, testicular cancer, colorectal cancer, prostatic cancer, and pancreatic cancer, or any antigenic portion thereof. In some embodiments, the tumor-associated antigen is a glioblastoma-associated antigen. In some embodiments, the tumor-associated antigen is one found on the cancer being treated.

[0084] Many types of tumor cells express antigens that are not found in normal cells. These antigens, known as tumor-associated antigens, have been intensively studied as targets for therapeutic anti-cancer vaccines. Exemplary tumor-associated antigens are lymphocyte antigen 6 complex, locus K (LY6K), cell division cycle associated 1 (CDCA1), insulin-like growth factor-II mRNA-binding protein 3 (IMP-3), kinesin family member 20A (KIF20A), glypican-3 (GPC3), forkhead box M1 (FOXM1), cadherin 3 (CDH3), secreted protein acidic and rich in cysteine (SPARC), cell division cycle 45 ligand (CDC45L), DEP domain containing 1 (DEPDC1), M-phase phosphoprotein 1 (MPHOSPH1), prostate-specific antigen (PSA), prostate-specific membrane antigen (PSMA), human epidermal growth factor receptor2/neuroblastoma (HER2/neu), carcinoembryonic antigen (CEA), mutated epidermal growth factor receptor (EGFR), melanoma antigen (MAGE), mucin-1 (MUC-1), and New York esophageal squamous cell carcinoma 1 (NY-ESO-1), BAGE, GAGE, MAGE, NY-ESO-1, SSX, gp100, Melan-A/Mart-1, Tyrosinase, Mammaglobin-A, p53, livin, survivin, β-Actin/4/m, Myosin/m, HSP70-2/m, HLA-A2-R170J, GM2, GD2, GD3, MUC-1, sTn, globo-H, WT1, PRI, E75, ras, AFP, URLC10, VEGFR1 and 2, mutant p53, NY-ESO-1, HPV16 E7, β-catenin, CDK4, CDC27, α-actinin-4, TRP1/gp75, TRP2, gangliosides, WT1, EphA2, EphA3, CD20, telomerase, MART-1, or an antigenic portion thereof. See Hirayama et al. 2016, Int. Immunol. Advance Access May 28 pp 1-26. In some embodiments, the tumor-associated antigen is EphA2.

[0085] Moreover, also encompassed are variants of the aforementioned tumor-associated antigens. Such variants have at least the same essential antigenic activity as the specific tumor-associated antigens. Moreover, it is to be understood that a variant as referred to in accordance with the present invention shall have an amino acid sequence which differs due to at least one amino acid substitution, deletion and/or addition, wherein the amino acid sequence of the variant is still, preferably, at least 50%, 60%, 70%, 80%, 85%, 90%, 92%, 95%, 97%, 98%, or 99% identical with the amino sequence of the specific tumor-associated antigen. The degree of identity between two amino acid sequences can be determined by algorithms well known in the art.

[0086] The third nucleic acid sequence can be inserted into the nucleotide sequence expressing the chimeric oncolytic virus using the methods known to those skilled in the art and described herein. For example, the pCK1166 vector (Cassady et al., J. Virol 86(a), p. 610-4 (2012)) can be used for recombination-based insertion of the transgene expression cassette including the sequence for expressing the tumor-associated antigen. In some embodiments, the third nucleic acid sequence is inserted into the chimeric oncolytic virus at the γ₁34.5 locus.

[0087] In some embodiments, the tumor-associated antigen is modified to include a binding protein or to increase its secretion by cells infected by the chimeric oncolytic virus. For example, in some embodiments the tumor-associated antigen includes a dendritic cell-binding peptide. In other embodiments, the tumor-associated antigen is a secreted protein. Suitable dendritic cell-binding peptides include those that bind to the dendritic cell-associated heparan sulfate proteoglycan-integrin ligand.

### Methods of Making

[0088] The chimeric oncolytic viruses disclosed herein and the compositions necessary to perform the disclosed methods can be made using any method known to those of skill in the art for that particular reagent or compound unless otherwise specifically noted. For example, the nucleic acids can be made using standard chemical synthesis methods or can be produced using enzymatic methods or any other known method. Such methods can range from standard enzymatic digestion followed by nucleotide fragment isolation (see for example, Sambrook et al., Molecular Cloning: A Laboratory Manual, 2nd Edition (Cold Spring Harbor Laboratory Press, Cold Spring Harbor, N.Y., 1989) Chapters 5, 6) to purely synthetic methods, for example, by the cyanoethyl phosphoramidite method using a Milligen or Beckman System 1Plus DNA synthesizer (for example, Model 8700 automated synthesizer of Milligen-Biosearch, Burlington, Mass. or ABI Model 380B). Synthetic methods useful for making oligonucleotides are also described by Ikuta et al., Ann. Rev. Biochem. 53:323-356 (1984), (phosphotriester and phosphite-triester methods), and Narang et al., Methods Enzymol., 65:610-620 (1980), (phosphotriester method). Protein nucleic acid molecules can be made using known methods such as those described by Nielsen et al., Bioconjug. Chem. 5:3-7 (1994).

[0089] The chimeric oncolytic viruses and viral vectors can be made recombinantly as set forth in the examples or by other methods of making recombinant viruses as described in many standard laboratory manuals, such as Davis et al., Basic Methods in Molecular Biology (1986) and Sambrook et al., Molecular Cloning: A Laboratory Manual, 2nd Ed., Cold Spring Harbor Laboratory Press, Cold Spring Harbor, N.Y. (1989). Similar methods are used to introduce a gene of interest in methods of making the viral vector described herein. For example, recombinant viruses can be constructed using homologous recombination after DNA co-transfection. In this example, cells can be co-transfected with at least two different viruses containing the genes of interest and progeny virus plaque can be purified based upon loss of marker expression. Final verification of the correct genetic organization of candidate viruses can be verified by DNA hybridization studies using probes to the nucleic acids as described herein.

[0090] The nucleic acid sequences described herein may be obtained using standard cloning and screening techniques, from natural sources such as genomic DNA libraries or can be synthesized using well known and commercially available techniques.

[0091] When the nucleic acid sequences are used recombinantly, the nucleic acid sequence may include the coding sequence for the mature polypeptide, by itself, or the coding sequence for the mature polypeptide in reading frame with other coding sequences, such as those encoding a leader or secretory sequence, a pre-, or pro- or prepro-protein sequence, or other fusion peptide portions. The nucleic acid sequence may also contain non-coding 5′ and 3′ sequences, such as transcribed, non-translated sequences, splicing and polyadenylation signals, ribosome binding sites and sequences that stabilize mRNA.

[0092] The nucleic acids may be used as hybridization probes for cDNA and genomic DNA or as primers for a nucleic acid amplification (PCR) reaction, to isolate full-length cDNAs and genomic clones encoding polypeptides and to isolate cDNA and genomic clones of other genes (including genes encoding homologs and orthologs from different species) that have a high sequence similarity.

[0093] The nucleic acids described herein, including homologs and orthologs from species, may be obtained by a process which comprises the steps of screening an appropriate library (as understood by one of ordinary skill in the art) under stringent hybridization conditions with a labeled probe or a fragment thereof; and isolating full-length cDNA and genomic clones containing said polynucleotide sequence. Such hybridization techniques are well known to the skilled artisan.

### Cancer Treatment

[0094] In one aspect, the present invention provides a method of treating cancer by in a subject by contacting a cancer cell of the subject with a chimeric oncolytic virus that includes a herpesvirus having a modified nucleic acid sequence. The modified nucleic acid sequence includes a modification of the herpesvirus gamma (1)34.5 gene (γ₁34.5) or a nucleic acid with at least about 70% homology to the γ₁34.5 gene that reduces its expression; a second viral nucleic acid sequence encoding a PKR evasion protein that does not cause virulence; and a third nucleic acid sequence encoding a tumor-associated antigen. The chimeric oncolytic virus can be any of the variants and embodiments described herein. For example, in some embodiments, the herpesvirus is an HSV-1 herpesvirus, while in further embodiments the second viral nucleic acid sequence is a cytomegalovirus (CMV) nucleic acid.

[0095] The invention provides a method of treating cancer in a subject in need thereof using the chimeric oncolytic herpesvirus described herein. The term “cancer” refers to a proliferative disorder caused or characterized by a proliferation of cells which have lost susceptibility to normal growth control. Cancers of the same tissue type usually originate in the same tissue, and may be divided into different subtypes based on their biological characteristics. Four general categories of cancer are carcinoma (epithelial cell derived), sarcoma (connective tissue or mesodermal derived), leukemia (blood-forming tissue derived) and lymphoma (lymph tissue derived).

[0096] Methods of treating cancer in a subject by contacting a cancer cell of the subject with a chimeric oncolytic virus are described. The contracting step can be performed in vivo or ex vivo. The target cell can be a solid tumor cell. The disclosed chimeric virus can also be used to treat a precancer condition such as cervical and anal dysplasia, other dysplasia, severe dysplasia, hyperplasia, atypical hyperplasia, or neoplasia. Thus, the target cell can be a adenocarcinoma, hepatoblastoma, sarcoma, glioma, glioblastoma, neuroblastoma, plasmacytoma, histiocytoma, melanoma, adenoma, myeloma, bladder cancer, brain cancer, squamous cell carcinoma of the head and neck, ovarian cancer, skin cancer, liver cancer, lung cancer, colon cancer, cervical cancer, breast cancer, renal cancer, esophageal carcinoma, head and neck carcinoma, testicular cancer, colorectal cancer, prostatic cancer, or pancreatic cancer. The target cells can be ectodermally-derived cancer cells. The target cells can be brain cancer cells. Thus, the target cell can be a neuroblastoma cell, glioma cell, or glioblastoma cell. The target cell can be a breast cancer cell. The target cell can be a hepatoblastoma cell or liver cancer cell. The method of killing a targeted cell can further comprise additional steps known in the art for promoting cell death.

[0097] Also provided herein is a method of treating cancer in a subject comprising contacting a cancer cell with the herein provided chimeric oncolytic virus. The cancer can be selected from the group consisting of adenocarcinoma, sarcoma, glioma, glioblastoma, neuroblastoma, plasmacytoma, histiocytoma, melanoma, adenoma, myeloma, hepatoblastoma, bladder cancer, brain cancer, squamous cell carcinoma of the head and neck, ovarian cancer, skin cancer, liver cancer, lung cancer, colon cancer, cervical cancer, breast cancer, renal cancer, esophageal carcinoma, head and neck carcinoma, testicular cancer, colorectal cancer, prostatic cancer, and pancreatic cancer. Thus, the cancer can be a glioma. In further embodiments, the cancer can be a glioblastoma. The cancer can be a neuroblastoma. The cancer can be a breast cancer. The cancer can also be pancreatic cancer or hepatoblastoma.

[0098] Glioblastomas (GBMs) suppress infiltrating and peripheral immune cell function. The tumors secrete TGF-β, IL-10 and prostaglandin E2, which downregulate T lymphocyte immune recognition and cytokine production. Regulatory T cells (T_{Regs}) and tumor associated macrophages within the tumor contribute to elevated IL-10 production, which functionally impairs infiltrating T effector cells. Several tumor antigens have been identified that are specifically expressed or upregulated in GBM, but immunosuppression in the tumor microenvironment and dysfunctional antigen processing pathways in malignant cells attenuate acquired immune responses. Mohme et al., Cancer Treat Rev, 40(2):248-58 (2014)

[0099] As described herein, the chimeric oncolytic virus used for cancer treatment includes a third nucleic acid sequence encoding a tumor-associated antigen. The tumor-associated antigen can be an antigen present only in a tumor cell and not on any other cell, or it may be an antigen present in some tumor cells and also in some normal cells. In some embodiments, tumor-associated antigen is one found on the cancer being treated. For example, EphA2 is a tumor-associated antigen commonly expressed by glioblastoma. Accordingly, when treating glioblastoma, the chimeric oncolytic virus can be modified to express the tumor-associated antigen EphA2.

[0100] An anti-viral immune response contributes to the effect of the chimeric oncolytic virus. The chimeric oncolytic virus induces interferon signaling, which recruits both the innate (e.g., neutrophils, NK cells, and macrophages) and adaptive (CD4+, CD8+) immune responses, as well as improved antigen recognition. The chimeric oncolytic virus also reverses the immunosuppressive tumor environment, and stimulates anti-tumor immune recognition. Including tumor-associated antigens in the chimeric oncolytic virus enhances the vaccine approach, resulting in a chimeric oncolytic virus provides a persistent antitumor effect based on a vaccination effect.

[0101] Methods in accordance with the invention include administration of the chimeric oncolytic virus alone, or combination therapies wherein the animal is also undergoing one or more cancer therapies selected from the group consisting of surgery, chemotherapy, radiation therapy, thermotherapy, immunotherapy, hormone therapy and laser therapy.

[0102] In general any combination therapy will include one or more of chemotherapeutics, targeting agents like antibodies; kinase inhibitors; hormonal agents and the like. Combination therapies can also include conventional therapy, including, but not limited to, antibody administration, vaccine administration, administration of cytotoxic agents, natural amino acid polypeptides, nucleic acids, nucleotide analogues, and biologic response modifiers. Two or more combined compounds may be used together or sequentially. For example, anti-cancer agents that are well known in the art and can be used as a treatment in combination with the compositions described herein include, but are not limited to As used herein, a first line “chemotherapeutic agent” or first line chemotherapy is a medicament that may be used to treat cancer, and generally has the ability to kill cancerous cells directly.

[0103] Examples of chemotherapeutic agents include alkylating agents, antimetabolites, natural products, hormones and antagonists, and miscellaneous agents. Examples of alkylating agents include nitrogen mustards such as mechlorethamine, cyclophosphamide, ifosfamide, melphalan (L-sarcolysin) and chlorambucil; ethylenimines and methylmelamines such as hexamethylmelamine and thiotepa; alkyl sulfonates such as busulfan; nitrosoureas such as carmustine (BCNU), semustine (methyl-CCNU), lomustine (CCNU) and streptozocin (streptozotocin); DNA synthesis antagonists such as estramustine phosphate; and triazines such as dacarbazine (DTIC, dimethyl-triazenoimidazolecarboxamide) and temozolomide. Examples of antimetabolites include folic acid analogs such as methotrexate (amethopterin); pyrimidine analogs such as fluorouracin (5-fluorouracil, 5-FU, 5FU), floxuridine (fluorodeoxyuridine, FUdR), cytarabine (cytosine arabinoside) and gemcitabine; purine analogs such as mercaptopurine (6-niercaptopurine, 6-MP), thioguanine (6-thioguanine, TG) and pentostatin (2′-deoxycoformycin, deoxycoformycin), cladribine and fludarabine; and topoisomerase inhibitors such as amsacrine. Examples of natural products include vinca alkaloids such as vinblastine (VLB) and vincristine; taxanes such as paclitaxel (Abraxane) and docetaxel (Taxotere); epipodophyllotoxins such as etoposide and teniposide; camptothecins such as topotecan and irinotecan; antibiotics such as dactinomycin (actinomycin D), daunorubicin (daunomycin, rubidomycin), doxorubicin, bleomycin, mitomycin (mitomycin C), idarubicin, epirubicin; enzymes such as L-asparaginase; and biological response modifiers such as interferon alpha and interlelukin 2. Examples of hormones and antagonists include luteinizing releasing hormone agonists such as buserelin; adrenocorticosteroids such as prednisone and related preparations; progestins such as hydroxyprogesterone caproate, medroxyprogesterone acetate and megestrol acetate; estrogens such as diethylstilbestrol and ethinyl estradiol and related preparations; estrogen antagonists such as tamoxifen and anastrozole; androgens such as testosterone propionate and fluoxymesterone and related preparations; androgen antagonists such as flutamide and bicalutamide; and gonadotropin-releasing hormone analogs such as leuprolide. Examples of miscellaneous agents include thalidomide; platinum coordination complexes such as cisplatin (czs-DDP), oxaliplatin and carboplatin; anthracenediones such as mitoxantrone; substituted ureas such as hydroxyurea; methylhydrazine derivatives such as procarbazine (N-methylhydrazine, MIH); adrenocortical suppressants such as mitotane (o,p′-DDD) and aminoglutethimide; RXR agonists such as bexarotene; and tyrosine kinase inhibitors such as imatinib.

[0104] As used herein, the term “radiotherapeutic regimen” or “radiotherapy” refers to the administration of radiation to kill cancerous cells. Radiation interacts with various molecules within the cell, but the primary target, which results in cell death is the deoxyribonucleic acid (DNA). However, radiotherapy often also results in damage to the cellular and nuclear membranes and other organelles. DNA damage usually involves single and double strand breaks in the sugar-phosphate backbone. Furthermore, there can be cross-linking of DNA and proteins, which can disrupt cell function. Depending on the radiation type, the mechanism of DNA damage may vary as does the relative biologic effectiveness. For example, heavy particles (i.e. protons, neutrons) damage DNA directly and have a greater relative biologic effectiveness. Whereas, electromagnetic radiation results in indirect ionization acting through short-lived, hydroxyl free radicals produced primarily by the ionization of cellular water. Clinical applications of radiation consist of external beam radiation (from an outside source) and brachytherapy (using a source of radiation implanted or inserted into the patient). External beam radiation consists of X-rays and/or gamma rays, while brachytherapy employs radioactive nuclei that decay and emit alpha particles, or beta particles along with a gamma ray.

### Immunization Against Cancer

[0105] Another aspect of the invention provides a method of immunizing a subject against cancer. The method includes administering to the subject a chimeric oncolytic virus, comprising a herpesvirus having a modified nucleic acid sequence, comprising: a modification of the herpesvirus gamma (1)34.5 gene (γ₁34.5) or a nucleic acid with at least about 70% homology to the γ₁34.5 gene that reduces its expression; a second viral nucleic acid sequence encoding a PKR evasion protein that does not cause virulence; and a third nucleic acid sequence encoding a tumor-associated antigen, wherein the chimeric oncolytic virus is administered under conditions effective to immunize the subject against cancer. In some embodiments, the chimeric oncolytic virus is administered together with a pharmaceutically acceptable carrier.

[0106] The chimeric oncolytic virus can be any of the variants and embodiments described herein. For example, in some embodiments, the herpesvirus is an HSV-1 herpesvirus, while in further embodiments the modification of the herpesvirus γ₁34.5 gene comprises a deletion or mutation of the γ₁34.5 gene.

[0107] The chimeric oncolytic virus can be used to immunize a subject against any type of cancer described herein. For example, in some embodiments, the cancer is selected from the group consisting of adenocarcinoma, hepatoblastoma, sarcoma, glioma, glioblastoma, neuroblastoma, plasmacytoma, histiocytoma, melanoma, adenoma, myeloma, bladder cancer, brain cancer, squamous cell carcinoma of the head and neck, ovarian cancer, skin cancer, liver cancer, lung cancer, colon cancer, cervical cancer, breast cancer, renal cancer, esophageal carcinoma, head and neck carcinoma, testicular cancer, colorectal cancer, prostatic cancer, and pancreatic cancer cell. In a further embodiment, the cancer is glioblastoma.

[0108] Immunization can be used to decrease the likelihood that cancer will develop in a subject. In some embodiments, the chimeric oncolytic virus is administered to a subject who has been identified as being at risk of developing cancer (e.g., glioblastoma). A subject can be at risk of developing cancer as a result of a family history of developing cancer, the identification of genes associated with increased cancer risk, or the exposure to radiation or other carcinogenic material.

### Formulations and Methods of Administration

[0109] The chimeric oncolytic viruses and viral vectors described herein can be administered in vitro or in vivo in a pharmaceutically acceptable carrier. By “pharmaceutically acceptable” is meant a material that is not biologically or otherwise undesirable, i.e., the material may be administered to a subject, along with the nucleic acid or vector, without causing any undesirable biological effects or interacting in a deleterious manner with any of the other components of the pharmaceutical composition in which it is contained. The carrier would naturally be selected to minimize any degradation of the active ingredient and to minimize any adverse side effects in the subject, as would be well known to one of skill in the art.

[0110] The materials may be in solution, suspension (for example, incorporated into microparticles, liposomes, or cells). These may be targeted to a particular cell type via antibodies, receptors, or receptor ligands. Vehicles such as “stealth” and other antibody conjugated liposomes (including lipid mediated drug targeting to colonic carcinoma), receptor mediated targeting of DNA through cell specific ligands, lymphocyte directed tumor targeting, and highly specific therapeutic retroviral targeting of murine glioma cells in vivo. In general, receptors are involved in pathways of endocytosis, either constitutive or ligand induced. These receptors cluster in clathrin-coated pits, enter the cell via clathrin-coated vesicles, pass through an acidified endosome in which the receptors are sorted, and then either recycle to the cell surface, become stored intracellularly, or are degraded in lysosomes. The internalization pathways serve a variety of functions, such as nutrient uptake, removal of activated proteins, clearance of macromolecules, opportunistic entry of viruses and toxins, dissociation and degradation of ligand, and receptor-level regulation. Many receptors follow more than one intracellular pathway, depending on the cell type, receptor concentration, type of ligand, ligand valency, and ligand concentration.

[0111] Pharmaceutical compositions may include carriers, thickeners, diluents, buffers, preservatives, surface active agents and the like in addition to the molecule, in this case virus or viral vector, of choice. Pharmaceutical carriers are known to those skilled in the art. These most typically would be standard carriers for administration of drugs to humans, including solutions such as sterile water, saline, and buffered solutions at physiological pH. Suitable carriers and their formulations are described in Remington: The Science and Practice of Pharmacy (19th ed.) ed. A. R. Gennaro, Mack Publishing Company, Easton, Pa. 1995. Typically, an appropriate amount of a pharmaceutically-acceptable salt is used in the formulation to render the formulation isotonic. Examples of a pharmaceutically-acceptable carriers include, but are not limited to, saline, Ringer's solution and dextrose solution. The pH of the solution is preferably from about 5 to about 8, and more preferably from about 7 to about 7.5. Further carriers may include sustained release preparations such as semipermeable matrices of solid hydrophobic polymers containing the antibody, which matrices are in the form of shaped articles, e.g., films, liposomes or microparticles. It will be apparent to those skilled in the art that certain carriers may be more preferable depending upon, for instance, the route of administration and concentration of composition being administered.

[0112] Preparations for parenteral administration include sterile aqueous or non-aqueous solutions, suspensions, and emulsions. Examples of non-aqueous solvents are propylene glycol, polyethylene glycol, vegetable oils such as olive oil, and injectable organic esters such as ethyl oleate. Aqueous carriers include water, alcoholic/aqueous solutions, emulsions or suspensions, including saline and buffered media. Parenteral vehicles include sodium chloride solution, Ringer's dextrose, dextrose and sodium chloride, lactated Ringer's, or fixed oils. Intravenous vehicles include fluid and nutrient replenishers, electrolyte replenishers (such as those based on Ringer's dextrose), and the like. Preservatives and other additives may also be present such as; for example, antimicrobials, anti-oxidants, chelating agents, and inert gases and the like.

[0113] Some of the compositions may potentially be administered as a pharmaceutically acceptable acid- or base-addition salt, formed by reaction with inorganic acids such as hydrochloric acid, hydrobromic acid, perchloric acid, nitric acid, thiocyanic acid, sulfuric acid, and phosphoric acid, and organic acids such as formic acid, acetic acid, propionic acid, glycolic acid, lactic acid, pyruvic acid, oxalic acid, malonic acid, succinic acid, maleic acid, and fumaric acid, or by reaction with an inorganic base such as sodium hydroxide, ammonium hydroxide, potassium hydroxide, and organic bases such as mono-, di-, trialkyl and aryl amines and substituted ethanolamines.

[0114] The viruses and vectors can be administered in a number of ways depending on whether local or systemic treatment is desired, and on the area to be treated. Administration may be topical, oral, by inhalation, or parenterally, for example by intravenous drip, subcutaneous, intraperitoneal or intramuscular injection. The disclosed viruses and vectors can be administered intravenously, intraperitoneally, intramuscularly, subcutaneously, intracavity, or transdermally. Thus, administration of the provided viruses and vectors to the brain can be intracranial, subdural, epidural, or intra-cisternal. For example, the provided viruses and vectors can be administered directly into the tumors by stereotactic delivery. It is also understood that delivery to tumors of the CNS can be by intravascular delivery if the virus or vector is combined with a moiety that allows for crossing of the blood brain barrier and survival in the blood. Thus, agents can be combined that increase the permeability of the blood brain barrier. Agents include, for example, elastase and lipopolysaccharides. The provided viruses and vectors are administered via the carotid artery. In another aspect, the provided viruses and vectors are administered in liposomes, such as those known in the art or described herein. The provided viruses and vectors can be administered to cancers not in the brain intravascularly or by direct injection into the tumor.

[0115] Parenteral administration of the composition, if used, is generally characterized by injection. Injectables can be prepared in conventional forms, either as liquid solutions or suspensions, solid forms suitable for solution of suspension in liquid prior to injection, or as emulsions. A more recently revised approach for parenteral administration involves use of a slow release or sustained release system such that a constant dosage is maintained. See, e.g., U.S. Pat. No. 3,610,795, which is incorporated by reference herein for the methods taught therein.

[0116] It is also possible to link molecules (conjugates) to viruses or viral vectors to enhance, for example, cellular uptake. Conjugates can be chemically linked to the virus or viral vector. Such conjugates include but are not limited to lipid moieties such as a cholesterol moiety. (Letsinger et al., Proc. Natl. Acad. Sci. USA, 1989, 86:6553-6556).

[0117] The viruses and viral vectors described herein may be administered, for example, by convection enhanced delivery, which has been used with adenovirus and AAV to increase the distribution of the virus thorough bulk flow in the tumor interstitium. Chen et al., J. Neurosurg. 103(2):311-319 (2005) Genetic modifications have also been used to enhance viral spread. For example, insertion of the fusogenic glycoprotein gene produced an oncolytic virus with enhanced antiglioma effect. Fu et al., Mol. Ther. 7(6): 748-54 (2003). Therefore, the viral vectors described herein may comprise such a gene.

### Dosages

[0118] The exact amount of the compositions required will vary from subject to subject, depending on the species, age, weight and general condition of the subject, the severity of the disease being treated, the particular virus or vector used, its mode of administration and the like. Thus, it is not possible to specify an exact amount for every composition. However, an appropriate amount can be determined by one of ordinary skill in the art using only routine experimentation given the teachings herein.

[0119] Effective dosages and schedules for administering the compositions may be determined empirically, and making such determinations is within the skill in the art. For example, there are several brain tumor models that provide a mechanism for rapid screening and evaluation of potential toxicities and efficacies of experimental therapies. There are six separate human glioma xenograft models used for critical studies. Pandita et al., Genes Chromosomes Cancer 39(1): 29-36 (2004). There is also available a spontaneously derived syngeneic glioma model that does not express foreign antigens commonly associated with chemically or virally induced experimental tumors. Hellums et al., Neuro-oncol. 7(3): 213-24 (2005). Other animals models for a variety of cancers can be obtained, for example, from The Jackson Laboratory, 600 Main Street Bar Harbor, Me. 04609 USA, which provides hundreds of cancer mouse models. Both direct (histology) and functional measurements (survival) of tumor volume can be used to monitor response to oncolytic therapy. These methods involve the sacrifice of representative animals to evaluate the population, increasing the animal numbers necessary for the experiments. Measurement of luciferase activity in the tumor provides an alternative method to evaluate tumor volume without animal sacrifice and allowing longitudinal population-based analysis of therapy.

[0120] The dosage ranges for the administration of the compositions are those large enough to produce the desired effect in which the symptoms of the disease are affected. The dosage should not be so large as to cause adverse side effects, such as unwanted cross-reactions, anaphylactic reactions, and the like. The dosage can be adjusted by the individual physician in the event of any counterindications. Dosage can vary, and can be administered in one or more dose administrations daily, for one or several days.

[0121] Viral recovery and immunohistochemistry have been used successfully to monitor viral replication and spread in vivo. Bioluminescent and fluorescent protein expression by the virus can also be used to indirectly monitor viral replication and spread in the tumor. Genes encoding fluorescent reporter proteins (d2EGFP and dsRED monomer) or bioluminescent markers (firefly luciferase) are commonly used in recombinant viruses. Not only do these facilitate the screening and selection of recombinant viruses in vitro. The reporter genes also allow indirect monitoring of viral activity in in vivo studies.

[0122] The provided chimeric viruses require lower dosing as compared to existing attenuated herpesviruses. The provided chimeric virus significantly improves survival as compared to conventional attenuated herpesviruses, such as, for example, Δγ₁34.5 HSV, and is effective at lower doses. For example, the disclosed chimeric oncolytic virus is effective at from about 10³ pfu, including 10⁴, 10⁵, 10⁶, 10⁷, 10⁸, and 10⁹ pfu, or any amount in between. Thus, the dose of chimeric virus can be from 5×10³ to 5×10⁶ pfu, more preferably from 5×10⁴ to 5×10⁵.

[0123] The following examples are included for purposes of illustration and are not intended to limit the scope of the invention.

### EXAMPLES

### Example 1: oHSV Construction and Dendritic Cell Targeting

[0124] GBMs are one of the most fatal and treatment-refractory cancers leading to interest in experimental therapies. Two types of experimental therapies (dendritic cell immunotherapy and oHSV therapy) have demonstrated efficacy in recent early-phase clinical trials for adult GBM. Phuphanich et al., Cancer Immunol Immunother, 62(1): p. 125-35 (2013). Although they are distinct approaches, both strategies likely achieve efficacy through induction of anti-tumor immunity. Oncolytic HSV efficacy was previously attributed to direct replication-based lysis of tumor cells; however, viral activation of host cell antiviral responses is increasingly recognized as another significant effect, as these responses recruit potent anti-tumor effectors and stimulate acquired immune responses. Tumor cell selectivity of many oHSV are based on deletion of the γ₁34.5 neurovirulence gene (Δγ₁34.5 oHSV), which renders them safe for direct inoculation into the CNS, but also debilitates their replication in tumors. To overcome this, a chimeric Δγ₁34.5 oHSV (C134) was created that expresses the IRS1 gene from a distantly-related herpes virus, Human Cytomegalovirus (HCMV). Shah et al., Gene Ther, 14(13): p. 1045-54 (2007). C134 maintains protein translation unlike first generation oHSVs and this leads to improved viral replication in tumor cells without making the virus more virulent. C134 elicits a robust IFN response, culminating in improved recruitment and activation of innate and acquired effector cell populations. Cassady et al., J Virol, 86(1): p. 610-4 (2012).

[0125] The inventors have harnessed C134's protein translation and immunostimulatory properties to increase cross sensitization to tumor antigens by overexpressing glioma antigens directly from the viral genome. They previously demonstrated that virus-based transgene expression is efficient and may circumvent HSV pathways that suppress host cell gene expression, including potential tumor associated antigens (TAAs), upon infection. Shu et al., Proc Natl Acad Sci USA, 110(18): p. E1669-75 (2013). In addition, they have engineered C134-expressed TAA to be secreted from infected cells for targeted binding to dendritic cells (DCs). Antigen processing pathways in GBM and HSV-infected cells are attenuated, whereas HSV infection enhances MHC expression in neighboring cells, and recruits activated DCs into the surrounding tissue. Therefore, secreted TAA have a better chance of uptake and cross-presentation in APCs, and fusion of DC-targeting elements to TAAs should enhance this activity

[0126] Compared to Δγ₁34.5 oHSV, improved animal survival following C134 treatment appears to be mediated, in part, through stimulation of anti-tumor immunity. Previous studies have demonstrated that repeated oHSV administration in flank GBM models can induce acquired anti-GBM immunity. Iizuka et al., Int J Cancer, 118(4): p. 942-9 (2006). The inventors compared the level and specificity of immune responses induced following C134 and Δγ134.5 oHSV administration. The extent to which each virus induces anti-tumor responses over those directed towards viral antigens was also assessed. The inventors believe that C134 enhances acquired anti-tumor immune responses and these responses are the primary mechanism for its efficacy.

[0127] Construction of EphA2 shuttle vectors: The pCK1136 vector was used for recombination-based insertion of transgene expression cassettes into the γ₁34.5 locus of C134 (FIG. 1A, B). Cassady et al., J Virol, 86(1): p. 610-4 (2012). This vector utilizes the murine Egr-1 promoter to drive transgene expression. The inventors previously used this strategy to make a GFP-expressing derivative of C134 (C154). Four separate EphA2 derivatives were inserted into pCK1134, as depicted in FIG. 1C-F: The first will encode the full-length EphA2 reading frame with a C-terminal Myc tag (FIG. 1C). For secreted variants, the EphA2 coding sequence will be truncated to encompass either the extracellular domain (FIG. 1D-E) or the cytosolic domain. Fusion of the first 28 N-terminal residues of EphA2 to the cytosolic domain (aa 575-977) restores the cleavage potential of the EphA2 leader sequence, which should reroute the intracellular domain for secretion (FIG. 1F). All constructs will contain a C-terminal Myc tag to distinguish C134-expressed EphA2 from that of infected tumor cells. The inventors have identified a number of peptides that target DC cells (FIG. 4). For DC-targeting, the murine DC-binding peptide coding sequence can be engineered into the C-terminus of secreted EphA2 variants (FIG. 1E-F).

[0128] oHSV construction and validation: Each pCK1136-EphA2 variant was used for recombination with C154 by co-transfection into rabbit skin cells. Individual GFP-negative plaques were serially passaged and purified for further characterization. The EphA2 expression cassettes within viral clones were sequenced. To verify virus-based EphA2 expression results in elevated EphA2 levels, GL261 cells were infected with C134 and C134-EphA2 derivatives. EphA2 levels (total and Myc-tagged) were measured by Western analysis of infected cell lysates. Expression of secreted variants was evaluated by ELISA, and DC targeting was assessed by flow cytometric detection of binding to dendritic cells. Viral recovery assays was used to ensure all oHSV have equivalent replication rates.

[0129] The inventors evaluated whether C134-based antigen expression enhances GBM-specific CTL responses and survival in murine orthotopic GBM models. Orthotopic GL261 tumors will be established in syngeneic C57BL/6 mice. The first set of studies compared survival in mice implanted i.c. with cells that are infected with C134 or C134 expressing the full-length EphA2 variant ex vivo. The mice were re-treated on Days 5 and 15 post-transplant, and EphA2-specific responses were evaluated.

[0130] The inventors also determined whether secretion and targeting improves EphA2-specific responses. Animal studies were carried out to assess whether secretion of DC-targeted EphA2 variants (FIG. 1E, F) improves the survival. The inventors also evaluated a non-targeted EphA2 variant (FIG. 1D) to ascertain whether secretion and/or secretion with targeting is responsible for improved results. The experiments showed that EphA2-expressing C134 derivatives, particularly variants that are secreted and targeted to DCs, will improve survival of mice with GL261 tumors.

[0131] C134 mediates replication-dependent and independent survival benefits in murine brain tumor models. Preliminary studies in the human U87 GBM cell line demonstrated that C134 has a 1000-fold higher replication rate, compared to a Δγ₁34.5 virus, which translates into improved survival in immunodeficient animals with U87 tumors (FIG. 2A). However, C134 is also protective in immunocompetent mice bearing syngeneic Neuro2A tumors, in which there is no replication advantage (FIG. 2B). These data suggest that C134 may also have enhanced immunostimulatory potential. To test this phenomenon in a syngeneic GBM model, mice were implanted with i.c. DBT cells and treated with saline, Δγ₁34.5 (R3616), or C134 oHSV. Surviving animals in each cohort were subsequently rechallenged with DBT flank tumors. Serum and splenocytes obtained from surviving animals were then assessed for immunoreactivity. As shown in FIG. 3A, serum collected from naive and all treatment groups detected a common band in both DBT and Neuro2A (N2A) cell lysates. However, C134-treated mouse sera recognized a unique ˜60 KDa band in extracts of both cell lines (arrow), even after a 4000-fold dilution. Similarly, DBT cell cytotoxicity was achieved with a 10-fold excess of mixed splenocytes collected from C134-treated mice (FIG. 3B). These studies demonstrate C134-based stimulation of anti-tumor immunity, and suggest these effects can be enhanced by directing immunity to specific TAAs.

[0132] In addition to C134-based expression of EphA2 variants for induction of anti-tumor immunity, the inventors evaluated incorporate DC-targeting domains to enhance these responses. Using Phage Display, they previously identified a peptide that binds to myeloid derived DCs, and the peptide maintains binding function when incorporated as N- and C-terminal protein fusions. Alberti et al., Gene Ther, 20(7): p. 733-41 (2013). They also recently identified 12-mer peptides that bind to the dendritic cell-associated heparan sulfate proteoglycan-integrin ligand (DCHIL/GPNMB) (FIG. 4A). GPNMB expression on dendritic cells prevents memory and effector T cell activation through co-inhibitor interactions with syndecan-4. These peptides may allow for both targeting of antigens to GPNMB-expressing APC and inhibition of GPNMB-mediated T-cell suppression.

### Example 2: Evaluation of a DBT Malignant Glioma Cell Line for Modeling the oHSV Anti-Tumor Response

[0133] Increasingly, the immune response is recognized as an important component for long term anti-tumor effect contributing to anti-tumor therapies (biologics, radiation therapy, chemotherapy). In the past, researchers have questioned the importance of the immune response and its role in oHSV mediated anti-tumor activity. These studies have allowed us to develop an in vivo model that is primarily dependent upon the immune mediated anti-tumor response. As shown in FIG. 5A, the DBT malignant glioma cell line in contrast to other glioma cell lines is highly resistant to oHSV infection and cytopathic effect.

[0134] Using this model, the inventors were able to identify differences in the oncolytic activity between our first and second generation recombinant viruses and how cytokine expression, dosing schedule, and prior immunity influence the indirect antitumor response. In contrast to past CNS tumor models, viral yields are equivalent between 1st and 2nd generation oHSVs in vivo and direct viral cytolysis does not significantly contribute to the anti-tumor activity in this syngeneic glioma (FIG. 5); thus allowing us to assess immune mediated anti-tumor effect in isolation.

[0135] In the DBT model, C134 is again superior to first generation Δγ₁34.5 oHSV (FIG. 6A) despite equivalent viral replication in the CNS tumors (FIG. 5B). This suggests that there are differences in either the cytopathic activity of the viruses (independent of replication) or that the immune-mediated response differs. In past neuroblastoma-based studies, the inventors identified that the immune response contributes to this difference. Implantation of N2A tumors in the CNS of athymic nude mice eliminated any survival advantage for the oHSV anti-tumor therapy. To test if the immune response contributed to this anti-tumor response, DBT tumor cells were implanted in the flanks of survivors and naïve mice. The previously oHSV treated survivor mice suppressed tumor growth during re-challenge, suggesting that a circulating anti-tumor immunity had developed in these survivors. In contrast the implanted tumors grew uncontrolled in the oHSV and Tumor inexperienced naïve mice. These studies reinforce that the anti-tumor immune response contributes to oHSV therapy and that this is not unique to a single animal or tumor type.

[0136] A winn-type assay was performed to determine if the anti-tumor immune response could be primed. These studies identified that repeated dosing of all of the viruses tested improves oHSV anti-tumor activity for both our 1st generation and our 2nd generation C134 oHSVs (FIG. 7). These studies also suggest that foreign antigen expression from the oHSV may extend survival (FIG. 7: C154: C134+EGFP). Studies also verified that priming the immune response by pro-inflammatory mIL-12 cytokine expression from C134 also extends survival in a glioma model (FIG. 8, C002 vs C134). Previous studies showed a similar benefit in a neuroblastoma CNS model; these studies confirm this for glioma as well.

[0137] Studies also identified long term anti-tumor benefits from oHSV therapy. oHSV treatment improved durable anti-tumor immunity over mice exposed to tumor antigens alone (FIG. 9). The oHSV-mediated anti-tumor immunity appears to be a circulating immune response and did not require resident memory cells in that the surviving mice were able to reject tumors implanted in a distant site.

[0138] The inventors had hypothesized that prior immunity may improve the immune response and increase bystander damage to the tumor; however, their findings suggested that pre-existing HSV immunity does not improve the oHSV anti-tumor effect and did not improve survival (FIGS. 10A&B). For the “unarmed” oHSVs (R3616 and C134), prior immunity was of no benefit but it was also not detrimental.

[0139] Unexpectedly, it was found that prior immunity was detrimental to the C134-based mIL-12 cytokine expressing virus C002 (FIG. 10C). As discussed previously, IL-12 expression (which enhances T cell activation) significantly improved C134 anti-tumor activity (FIG. 8). The inventors had anticipated that C002 would improve the anti-tumor activity of these primed T cells. However, it was discovered that HSV immunity adversely affected this recombinant and eliminated any advantage provided by the IL-12 expression, rendering it only as effective as a C134 in HSV-immune mice. The inventors have determined that C002 does not replicate as well during the initial days post-inoculation in mice with prior immunity. Quantitative PCR studies are also examining viral IL-12 transgene expression. The loss of IL-12 expression could explain why C002 (C134+mIL12) behaved similar to a C134 oHSV in this study.

[0140] The findings were unanticipated and suggest that there are different contributors to oHSV activity in the HSV naïve and HSV experienced individuals and raise several new questions. Is this loss of oHSV activity specific to “armed” transgene expressing viruses or are 11-12 expressing viruses unique in their ability to enhance the anti-HSV immune response? Does prior immunity limit the replication of all of our oHSVs (1st generation Δγ134.5 and C134) shifting the direct and indirect anti-tumor contribution in immunized animals? Our past studies have used survival as our measure for overall oHSV anti-tumor activity. This readout combines direct and indirect anti-tumor effect. While past studies showed no change in “net anti-tumor effect”, prior immunity may shift the relative contribution direct (viral cytolysis) and indirect immune mediated anti-tumor effect. This is an especially important issue with our newer generation armed oHSVs (like C002 or M002) that rely on robust viral gene expression.

[0141] The inventors created and validated 6 different C134-based tumor antigen expressing viruses (summarized in FIG. 11). Two isolates for each of the 6 viruses (12 viruses) were collected, named (C170-181) and validated by DNA hybridization, transgene expression, intracellular antigen localization, and cellular secretion during infection (FIG. 5). Remaining to be accomplished: Show evidence of MBP tag function (binding to antigen presenting cells [APCs]) in vitro and in vivo.

[0142] In conclusion, the inventors were able to validate a tumor model that unequivocally shows that the immune response contributes to oHSV therapy and that this response can be modulated to improve durable anti-tumor effects. They also found that it was not enough to produce an immune response against the virus. In fact, while focusing on the anti-viral immune response did not hinder the first or second generation oHSVs, it did affect survival of mice treated with the armed cytokine-expressing virus. Development of tumor antigen expressing oHSVs (C170-C181) allows for further dissect the role of the anti-tumor and anti-viral immune response.

### Example 3: Antigen-Expressing Oncolytic Virus—A Multimodal Anti-Tumor Vaccine Targeting Shared Antigens

[0143] To determine if virus based tumor associated fetal antigens (TAFAs) expression improves anti-tumor immunity in tumors resistant to OV immunotherapy, the inventors created a C134 based virus (C170) that encodes the murine (B6) TAFA Ephrin A2. Using both in vitro and in vivo B6 syngeneic models, they investigated how viral TAFA expression influences OV anti-tumor activity and immune response against the EphA2. The results show that C134 based EphA2 expression improves antitumor effect, changing the tumor associated immune infiltrates and improving anti-tumor memory response, abscopal effect and eliciting specific anti-EphA2 T cell response when compared to the C134 treated cohort. These exciting findings confirm that OVs can be modified to enhance immune recognition of “self” TAFAs and that this strategy can be harnessed as an approach to use viruses for in vivo anti-tumor vaccination.

### Materials and Methods

### Cell Lines and Viruses

[0144] CT2A cells were kindly provided by Dr. Seyfried Boston College and were propagated in Dulbecco's modified eagle medium (DMEM) supplemented with 10% fetal bovine serum (FBS). 67C-4 was kindly provided by Dr. Tim Cripe and was developed and provided to him by his collaborator Dr. Nancy Ratner and maintained in DMEM supplemented with 10% FBS.

[0145] Tumor lines were tested negative for mycoplasma contamination using the ATCC universal Mycoplasma detection kit. Tumor cells with relative low passage numbers (<12 passages) were used in the study before returning for a “low” passage form of the cell line to minimize genetic drift in our studies. Viruses have been previously described (Ghonime et al., Translational oncology, 11:86-93 (2017)), but in brief, HSV-1 (F) strain and R3616, the Δγ₁134.5 recombinant, were kindly provided by Dr. Bernard Roizman (University of Chicago, Chicago, Ill.). Chou et al., Science, 250:1262-6 (1990). C134 has been described previously. Shah et al., Gene Ther, 14:1045-54 (2007). Briefly, C134 is a Δγ₁134.5 virus that contains the HCMV IRS1 gene under control of the CMV IE promoter in the UL3/UL4 intergenic region. Cassady K A., J Virol, 79:8707-15 (2005). C154 is an EGFP-expressing version of C134.

### Viral Spread Assay (In Vitro)

[0146] B76, B96, 67C-4 and 5NPCIS cells were plated into clear, 48-well flat-bottom polystyrene tissue culture-treated microplates (Corning, N.Y., USA) and allowed to adhere overnight at 37° C. Cells were infected the following day with an EGFP-expressing second-generation oHSV-1 (C154) at the indicated multiplicity of infection (MOI), and the plates monitored using the IncuCyte ZOOM platform, which was housed inside a cell incubator at 37° C. with 5% CO₂ until the end of the assay. Nine images per well from three replicates were taken every 3 hours for 3 days using a 10× objective lens and then analyzed using the IncuCyte™ Basic Software. Green channel acquisition time was 400 ms in addition to phase contrast.

### Animal Studies

[0147] Animal studies were approved by the Nationwide Children's Hospital Institutional Animal Care and Use Committee (IACUC; protocol number AR16-00088) and performed in accordance with guidelines established by NIH Guide for the Care and Use of Laboratory Animals. Two syngeneic C57/B16 tumor models were used in these studies: an intracerebral CT2A glioma tumor model and a flank 67C4 malignant peripheral nerve sheath tumor (MPNST) model.

[0148] For the flank tumor model, 2×10⁶ 67C-4 MPNST cells were injected subcutaneously into the flanks of 6- to 8-week-old C57BL/6 mice (Envigo, Frederick, Md.). Tumor sizes were measured biweekly by caliper after implantation, and tumor volume was calculated by length×width×depth. When tumors reached 25-150 mm³ in size, animals were pooled and randomly divided into the specified groups, discussed below, with comparable average tumor size. Mice were treated with vehicle, C134 or C170 (3.5×10⁷ in 100 μL 10% glycerol in PBS) intratumorally (IT) on day 4 (1 day after the last RUX dose) and again a week later. Studies were repeated 3 times to ensure biological validity.

[0149] For survival studies, animals were monitored for tumor volumes three times per week after the initial treatment, until total tumor volume/mouse exceeded 2000 mm³ or an individual tumor was >1500 mm³. Once overall tumor size exceeded these criteria, mice were sacrificed based upon IACUC requirements. For cell recruitment analysis and in vivo gene expression, tumors were harvested, as described below, 6 days after the initial C134 or C170 injection. Tumors were washed in PBS and finely minced into small pieces. Then tissues were digested in RPMI 1640 containing collagenase D (2 mg/mL; Roche) and DNase I (0.01 mg/mL; Roche) for 30 min at 37° C. on a shaking platform. After collagenase digestion, the medium containing the mononuclear cells was strained and centrifuged at 400×g for 10 minutes at 4° C., and the resulting cells were resuspended in RPMI 1640 supplemented with 1% FBS and penicillin/streptomycin, and then used for flow cytometry analysis and RNA extraction. For the CD8 depletion studies, mice were treated with RUX similar to that described above, but upon initiation of the RUX therapy, mice were randomized into anti-CD8 depletion or isotype treatment cohorts. Mice were treated with 100 μg of anti-CD8 (Clone 2.43, Bio X Cell, West Lebanon, N.H.) or the isotype control (Clone LTF-2, rat IgG2a. Bio X Cell, West Lebanon, N.H.) intraperitoneally (IP) twice weekly throughout the experiment. Mice were then treated with IT C134 as described above. To quantify CD8 depletion, mice underwent a tail vein bleed (1 week after initiating CD8 depletion) and the CD8+ T-cell populations were analyzed using FITC-conjugated anti-CD8b (Clone: H35-17.2, eBioscience).

### IC Tumor Implantation and Treatment

[0150] 6- to 8-week-old C57BL/6 mice were obtained from (Envigo, Frederick, Md.). For survival studies, 1×10⁵ CT2A in 5% methylcellulose were intracerebrally injected into syngeneic C57BL/6 mice and treated 5 days later with vehicle or virus (1×10⁷ PFU/10 μl) as described previously. Russell S J, Barber G N., Cancer cell, 33:599-605 (2018) Mice were assessed daily and moribund mice killed sacrificed and date recorded. Survival curves were determined using Kaplan-Meier analysis and median survivals and 95% confidence intervals calculated. Log-rank test was applied to compare survival between groups. Studies were repeated twice to ensure biologic validity.

Viral Replication (in vivo)

[0151] 67C-4 tumors were established in 6- to 8-week-old female C57BL/6 as described above. When tumors reached 25-150 mm³ in size, mice were randomized and treated with C134 or C170 intratumoraly (3.5×10⁷ pfu in 100 μL 10% glycerol and PBS). On days 1, 3, and 5 post-virus treatment, tumor samples were harvested and homogenized. DNA was extracted by DNeasy blood and tissue kit (Qiagen, Germantown, Md.) per the manufacturer's instructions. Virus recovery was measured by Tagman quantitative PCR. Ghonime et al., Translational oncology, 11:86-93 (2017). Briefly, extracted DNA samples were incubated with the following HSV-specific primers and probes for HSV polymerase. HSV genome equivalents of the amplified product were measured from triplicate samples using an StepOne Plus real-time PCR system (Applied Biosystems, Foster City, Calif.) and compared against logarithmic dilutions of a positive control DNA sequence (10⁶-10¹ copies). Descriptive statistical analyses (mean and SD) were used to compare differences in DNA copy numbers between samples using Prism 78.0 statistical software (GraphPad).

### RNA Isolation

[0152] Total RNA was isolated from tumor samples using the Direct-zol RNA Miniprep Plus kit (Zymo Research, Irvine, Calif.) according to the manufacturer's instructions. RNA quantity and purity was determined using a NanoDrop 2000 Spectrophotometer (Thermo Fisher Scientific, Charlotte, N.C.). 2 μg of total RNA was used to synthesize cDNA using SuperScript III Reverse Transcriptase (Life Technologies, Carlsbad, Calif.) according to the manufacturer's instructions.

### Flow Cytometry

[0153] Single-cell suspensions from tumors were obtained as described previously. Leddon et al., Molecular therapy oncolytics, 1:14010 (2015) Briefly, tumors were washed in PBS and finely minced into small pieces. Then tissues were digested in RPMI 1640 containing collagenase D (2 mg/mL; Roche) and DNase I (0.01 mg/mL; Roche) for 30 minutes at 37° C. on a shaking platform. After collagenase digestion, the medium containing the mononuclear cells was filtered and centrifuged at 400×g for 10 minutes at 4° C., and the resulting cells were resuspended in PBS supplemented with 1% FBS and then used for flow cytometry analysis. Single-cell suspensions from tumors were lysed with RBC lysis buffer (Sigma) and blocked with 5% mouse Fc blocking reagent (2.4G2, BD Biosciences, San Jose, Calif.) in FACS buffer (1% FBS and 1 mM EDTA in PBS). Cells were labeled with the following antibody staining panels for analysis of the adaptive immune cells: (1) CD11b-Violet 421 (M1/70), CD4-BV785 (GK1.5), CD25-PE (7D4), CD8a-BV510 (53-6.7), CD3ε-BV 711 (145-2C11), CD44-APC, CD45-BV605, NKp46-PE-Cy7 and B220-AF488 (RA3-6B2) from BioLegend (San Diego, Calif., USA). Dead cells were excluded by staining with Live/Dead Near/IR staining (APC-Cy7) (Thermo Fisher Scientific, Charlotte, N.C.). Single samples were stained with the above staining panels for 30 minutes on ice and washed one time with FACS buffer. After labeling, cells were fixed in 10% paraformaldehyde and analyzed on a BD FACS LSR II (BD Biosciences). Analysis was carried out using the FlowJo software, version 10.0.3 (Tree Star Inc., Ashland, Oreg.).

### IncuCyte ZOOM Viral Spread Assay

[0154] Cells were plated into 96-well flat clear bottom polystyrene tissue-culture treated microplates (Corning, N.Y., USA) and allowed to adhere for overnight. C134 or C170 were added at indicated MOI and the plates were transferred into the IncuCyte ZOOM platform which was housed inside a cell incubator at 37° C. with 5% CO₂, until the end of the assay. Four images per well from three technical replicates were taken every 3 hours for 3 days using a 10× objective lens and then analyzed using the IncuCyte™ Basic Software. Green channel acquisition time was 400 ms in addition to phase contrast.

### Western Blotting

[0155] Cellular lysates form tumor samples were collected on ice in disruption buffer (10 mM Tris-Cl pH 8.0, 1 mM EDTA, 1% Triton X100, 0.1% sodium deoxycholate, 0.1% SDS, 140 mM NaCl, 20% β-mercaptoethanol, 0.04% bromophenol blue) with complete, mini protease inhibitor cocktail (Roche, Indianapolis, Ind.). The protein concentrations were determined using Pierce™ BCA Protein Assay Kit (Thermo Scientific, Rockford, Ill.). Samples were denatured at 98° C. for 5 minutes, chilled on ice, separated by PAGE, transferred to a nitrocellulose membrane (Thermo Scientific, Rockford Ill.) and blocked for 1 hour at room temperature with 5% dry milk (S.T. Jerrell Co.) or bovine serum albumin (Fisher Scientific, Rockford, Ill.). Membranes were incubated overnight at 4° C. with primary antibody diluted in Tris-buffered saline with 0.1% Tween-20 (TBST). Primary antibodies against RIG-I (clone D14G6), MDA-5 (clone D74E4), and p-STAT-1 (clone 58D6) were purchased from Cell Signaling Technology and against actin (clone C4) from Chemicon. Membranes were repeatedly washed with TBST, incubated for 1 hour with HRP-conjugated goat anti-rabbit (Pierce) for RIG-I, MDA-5, and p-STAT-1 or goat anti-mouse (Pierce) for actin diluted in TBST (1:20,000 dilution) at room temperature, and subsequently washed with TBST. Membranes were developed using SuperSignal West Pico Chemiluminescent Substrate (Thermo Scientific, Rockford, Ill.) and exposed to x-ray film (Research Products International).

Peptide-Pulsing of Splenocytes with Class I(Kb)-Restricted Peptide Epitope of EphA2

[0156] Splenocytes (5×10⁵) from the treated tumor bearing mice were plated in round-bottom 96-well plates and stimulated or not with 10 μM EphA2 peptide (671-FSHHNIIRL-679) for 6 hours. Samples were incubated with protein transport inhibitor containing 1 μl/mL Brefeldin A (Golgi-plug™, BD Biosciences, San Jose, Calif.) for 6 h hours prior to flow cytometry staining and CD8 T lymphocytes were analyzed by flow cytometry for granzyme B intracellular staining and activation (CD25).

### Statistical Analysis

[0157] Statistical analysis was performed using Prism 8 (GraphPad Software). One-way ANOVA with correction for multiple comparisons (Holk-Sidham or Kruskal Wallace as specified) was used for analysis involving multiple cell lines or otherwise specified. For comparing tumor growth over time between two treatment groups, two-way ANOVA with Sidak's multiple comparisons test was used. Survival was assessed using log-rank assay and data shown using Kaplan-Meier curves. For all analyses, the cutoff for statistical significance was set at P<0.05. The following notation was used: (ns) P>0.05, (*) P≤0.05, (**) P≤0.01, (***) P≤0.001.

### Results

[0158] Construction and Characterization of an EphA2-Expressing oHSV

[0159] The ability of the immune system to distinguish between normal and cancer cells is essential for cancer immunotherapy and based on retaining sufficient antigenicity by the malignant cells. Coulie et al., Nature reviews Cancer, 14:135-46 (2014). However, tumor cells may lose their antigenicity to evade immune-mediated elimination. Loss of antigenicity can occur by several mechanisms such as the immune selection of cancer cells that lack or mutate immunogenic tumor antigens, dysregulation of antigen processing machinery, or impediment of tumor antigen presentation (e.g., downregulation or loss of major histocompatibility expression). Schreiber et al., Science, 331:1565-70 (2011). The inventors sought an approach that would enhance the immune recognition and antigenicity of therapeutically resistant. They hypothesized that by engineering an oncolytic virus that expresses shared fetal antigens (expressed in many tumors), we could improve the immunotherapeutic response against these fetal antigens capitalizing on the virus's natural tendency to break immune tolerance. Ehl et al., J Exp Med., 187:763-74 (1998).

[0160] To test this hypothesis, an oncolytic HSV was created that expresses a tumor associated “shared” fetal antigen (EphrinA2) widely expressed in malignant gliomas, sarcomas, and many carcinomas (breast, prostrate, ovarian, pancreatic and colorectal cancer). Tandon et al., Expert Opin Ther Targets. 15:31-51 (2011) Because the studies were focused on using the virus as a flexible platform to present these “self” tumor associated embryonic antigens, oHSV recombinants (C170 and C172) were constructed that express the full length and the secreted extracellular domain of the C57BL/6 Ephrin type-A receptor 2 (EphA2) as outlined in FIG. 12A. HSV recombinants containing the EphA2 gene were verified genetically by DNA hybridization studies and EphA2 protein expression was verified by western blot for right protein size (FIG. 12B), immunofluorescence for localization (FIG. 12C), and by flow cytometry (FIG. 12D) in cell culture based studies. The results show that C170 expresses cell associated EphA2 of the predicted MW 97 kd (FIG. 12B) and with a membrane distribution in infected cells (FIG. 12C). Flow cytometry studies also show that C170 infection increases the EphA2 surface expression above that naturally occurring in either CT2A (C57BL/6-based MG) and 67C-4 (C57BL/6-based MPNST) tumor lines. As indicated above, the goal of this new virus was to improve the immunotherapeutic response to OV treated tumors. The inventors therefore first evaluated how EphA2 insertion and expression influenced viral replication, spread and direct oncolytic activity. To test this, C170 and C134 (the parent virus) replication and cytopathic activity were compared in human and murine tumor lines. As anticipated both viruses have comparable viral replication in CT2A (murine MG line), U87 (Human MG line), 8814 (human MPNST) and 67C-4 (murine MPNST line). This suggests that the new transgene insert did not change virus replication in the tumor lines. Real time evaluation of cell proliferation using Incuyte zoom showed that both C134 and C170 reduce CT2A tumor cell growth equivalently and that in the highly resistant 67C-4 model, neither virus (C134 nor C170) significantly suppress cell growth directly even at a high multiplicity of infection (FIG. 13A-D). In contrast, both viruses inhibited CT2A tumor cell growth in vitro at an MOI 1 and 10. The results show that C170 and C134 replicate similarly, spread and cytopathic activity in vero cells and in human and murine tumor lines in vitro and highlight differences in oHSV oncolytic activity in two different C57BL/6 tumor lines in vitro.

### C170 Improves Reduces Tumor Growth and Improves Survival and in Two Different Highly-Resistant Syngeneic Models

[0161] The inventor next sought to evaluate the antitumor activity of the new EphA2-expressing oHSV-1 (C170 and C172) in a therapeutically resistant CT2A syngeneic brain tumor model. CT-2A tumors are an C57BL/6-based anaplastic astrocytoma established by Siefried et al. using chemical induction. Seyfried et al., Molecular and chemical neuropathology, 17:147-67 (1992). The CT2A tumor model recapitulates many of the characteristics of human GBMs that make them so difficult to treat. Like human tumors the CT-2A tumors are radio and chemo resistant, infiltrative with high intra-tumoral cellular heterogeneity, and share similarities with neural stem cells (forming neurospheres when cultured in serum-free media and express stem cell markers such as CD133, Oct, and nestin. Oh et al., J Transl Med., 12:107 (2014). Mice bearing orthotopic CT2A tumors were oHSV-(1×10⁷ PFU) or saline-treated and survival was monitored. Consistent with the in vitro studies, C134 and C170 replicate equally in this tumor model in vivo. Although of equivalent replication capacity, only C170 was able to improve overall animal survival. The median survival for C170 mice was 43 days compared to 29 and 30 days for mock, C172 and C134-treated mice, respectively (FIG. 14A). Furthermore, some of the C170 and a limited number of C134-treated mice cleared their tumors suggesting that the immune response may contribute to oHSV anti-tumor activity. The initial studies also showed that while C170 (C134 based virus expressing the full length EphA2 including both EC and IC domains) improved survival, the C172 virus expressing the secreted EC domain of EphA2 was ineffective and was no different than Saline treatment. This suggests that certain EphA2 domains expressed by the virus were instrumental in OV antitumor effect.

[0162] To determine if this difference in oHSV anti-tumor activity was limited to the CT2A tumor model, full-length EphA2 expressing oHSV and C134 was examined in a resistant syngeneic tumor model (67C4 MPNSTs) that shares the same tumor antigen; EphA2. Ghonime et al., Cancer immunology research, 6:1499-510 (2018) Also, C172 was excluded from these studies as it didn't show any survival benefit in the CT2A model. The inventors confirmed the expression of EphA2 on 67C-4 tumor cells and found upregulation of EphA2 expression upon C170 infection, as shown in FIG. 14B. They found that a single treatment of C170 significantly attenuated tumor growth compared to C134 and mock treated groups suggesting that C170 has a better antitumor activity and might be effective in any tumor model that shares EphA2 antigen.

### C170 Treatment Alters Leukocyte Infiltrates in Brain Tumors

[0163] As indicated above, both C134 and C170 replicated equivalently in the tumor models and therefore, based upon other studies by the inventors, were anticipated to have equivalent direct anti-tumor activity. They next focused on immune response related to OV-treatment. To evaluate this, the immune cell infiltrates from treated animals were examined to identify differences between C170, C134 and saline treated mice, treated animals were sacrificed, saline perfused them and harvested brains from mock, C134 and C170-treated tumor-bearing mice and compared the immune cell infiltrates. The results show that both the parent oncolytic HSV-1 (C134) and the EphA2-expressing virus (C170) increased leukocyte migration to the tumor as shown in FIG. 15. Of note as shown the pie chart, C170 exhibited a slight increase in the T cell to Myeloid balance with T cells predominating in the C170 treatment cohort. C134 also induced a sizeable T cell infiltrate but along with this also enhanced the myeloid recruitment to the brain. Next, the T cell population's composition was examined and identified that both C134 and C170 induced T cell migration, but only C170 induced a statistically significant increase in the absolute number of T cells in TME (FIG. 15). Both viruses caused significant increase in the number of CD4T, but only C170 caused a significant increase in the number of CD8T cells which might suggest a key role of these cells in the observed antitumor effect. To elucidate the underlying mechanism of the observed antitumor effect, the different subsets of CD8T cells were examined. It was found that both viruses induced CD8T activation as shown in Figure by the CD25 activation marker and increased the number of the effectors CD8 T (CD8 TEFF) cells in TME with a trend of higher number in C170 treated mice. However, only C170 significantly increased the central memory CD8T cells (CD8 TCM) population numbers as shown in FIG. 15. Hu G, Wang S., Scientific reports, 7:10376 (2017).

[0164] The inventors also examined the oHSV treated 67C-4 MPNST tumors and the periphery for immune cells profile. C170 treated tumors again demonstrated a reduction in the in myeloid population and myeloid-derived suppressors cells (MDSCs) and a significant increase in the TCM population consistent with results from the brain tumor model and (FIG. 16). Furthermore, splenocytes from the saline and oHSVs treated animals showed a significant decrease in the myeloid population and myeloid-derived suppressors cells (MDSCs) and a significant increase in the CD8T cells in C170-treated 67C-4 tumor-bearing mice (FIG. 16). Prior studies have shown that this shift in myeloid and MDSCs population (FIG. 16) and increases in the CD8 T cell population is associated with consistent with results from the brain tumor model. Katoh H, Watanabe M., Mediators of inflammation 2015, 159269 (2015).

### Tumor-Antigen Expressing Oncolytic Virus Develop Systemic Memory and a Durable Anti-Tumor Antigen Response

[0165] Based upon the results showing that C170 treated mice induces a central memory population in the tumor, the inventors next examined if the treated mice who responded to oHSV therapy developed systemic memory against the virus expressed tumor antigen.

[0166] C170 and C134 produced long term survivors in the CT2A model providing a unique opportunity to test this hypothesis using a functional study. The long-term survivors from the CT2A from the C134 and C170-treated cohorts and age-matched naïve mice were therefore re-challenged to check the development of durable antitumor response. As shown in FIG. 17A-17B, when long term survivors and naïve mice were challenged with CT2A flank tumors, only the C170 long term survivors reduced tumor growth. Consistent with the earlier phenotype data, this suggests that C170 uniquely induces a durable memory population that can circulate and identify the CT2A tumors leading to an abscopal effect (i.e., shrinking of tumors outside the scope of the localized treatment).

[0167] To further investigate this memory response, 67C4 tumor model samples were then examined. In contrast to the brain tumor model, the mice treated in the 67-C4 tumor studies were all sacrificed at the same time (when naïve mice tumors were >1500 mm³) as well as at day 6 post treatment in another study. This allowed the T cell functional response differences between the different treatment cohorts and the development of systemic memory in the periphery against oncolytic virus-expressed tumor antigen EphA2 to be examined. Peptide-pulsing functional assay with the MHC-1 restricted immunodominant peptide of the EphA2 (H-2Db; 671-CFSHHNIIRL-679) for 6 hours. While there was no change in the percentage of the CD8T after 6 hours of stimulation, it was found that only CD8T from mice treated with C170 exhibited a robust activation (CD25 expression) and expression of the effector cytokines (GzmB) as shown in FIG. 18 suggesting that these mice have circulating antigen-specific CD8T cells that could respond to tumor antigens upon re-exposure.

[0168] FIG. 19A-19C are a schematic representation of the viruses described herein. In these viruses, a mouse EpHA2 gene for use in some cell lines and examples. Of course the virus could be modified to encode a human EphA2 gene. Variations or isoforms of the exemplary sequences of also encompassed by the disclosure. FIGS. 19D-I disclose the complete genomic viral sequences of several chimeric viruses described herein.

[0169] The complete disclosure of all patents, patent applications, and publications, and electronically available materials cited herein are incorporated by reference. The foregoing detailed description and examples have been given for clarity of understanding only. No unnecessary limitations are to be understood therefrom. The invention is not limited to the exact details shown and described, for variations obvious to one skilled in the art will be included within the invention defined by the claims.

What is claimed is:

1. A chimeric oncolytic virus, comprising:
a herpesvirus having a modified nucleic acid sequence, comprising:
a modification of the herpesvirus gamma (1)34.5 gene (γ₁34.5) or a nucleic acid with at least about 70% homology to the γ₁34.5 gene that reduces its expression;
a second viral nucleic acid sequence encoding a PKR evasion protein that does not cause virulence; and
a third nucleic acid sequence encoding a tumor-associated antigen.

2. The chimeric oncolytic virus of claim 1, wherein the herpesvirus is an α herpesvirus.

3. The chimeric oncolytic virus of claim 2, wherein the herpesvirus is an HSV-1 herpesvirus.

4. The chimeric oncolytic virus of claim 1, wherein the modification of the herpesvirus γ₁34.5 gene comprises a deletion or mutation of the γ₁34.5 gene.

5. The chimeric oncolytic virus of claim 1, wherein the second viral nucleic acid sequence is a cytomegalovirus (CMV) nucleic acid.

6. The chimeric oncolytic virus of claim 5, wherein the CMV nucleic acid comprises an IRS-1 gene or a nucleic acid having at least 70% homology to the IRS-1 gene.

7. The chimeric oncolytic virus of claim 1, wherein the tumor-associated antigen includes a dendritic cell-binding peptide.

8. The chimeric oncolytic virus of claim 1, wherein the tumor-associated antigen is a secreted protein.

9. The chimeric oncolytic virus of claim 1, wherein the tumor-associated antigen is a glioblastoma-associated antigen.

10. The chimeric oncolytic virus of claim 1, wherein the tumor-associated antigen is EphA2.

11. The chimeric oncolytic virus of claim 1, wherein the third nucleic acid sequence is inserted into the chimeric oncolytic virus at the γ₁34.5 locus.

12. The chimeric oncolytic virus of claim 1, wherein the herpesvirus includes a fourth nucleic acid sequence encoding a different tumor-associated antigen from that encoded by the third nucleic acid sequence.

13. A method of treating cancer by in a subject by contacting a cancer cell of the subject with a chimeric oncolytic virus, comprising:
a herpesvirus having a modified nucleic acid sequence, comprising:
a modification of the herpesvirus gamma (1)34.5 gene (γ₁34.5) or a nucleic acid with at least about 70% homology to the γ₁34.5 gene that reduces its expression;
a second viral nucleic acid sequence encoding a PKR evasion protein that does not cause virulence; and
a third nucleic acid sequence encoding a tumor-associated antigen.

14. The method of claim 13, wherein the herpesvirus is an HSV-1 herpesvirus.

15. The method of claim 13, wherein the modification of the herpesvirus γ₁34.5 gene comprises a deletion or mutation of the γ₁34.5 gene.

16. The method of claim 13, wherein the cancer is selected from the group consisting of adenocarcinoma, hepatoblastoma, sarcoma, glioma, glioblastoma, neuroblastoma, plasmacytoma, histiocytoma, melanoma, adenoma, myeloma, bladder cancer, brain cancer, squamous cell carcinoma of the head and neck, ovarian cancer, skin cancer, liver cancer, lung cancer, colon cancer, cervical cancer, breast cancer, renal cancer, esophageal carcinoma, head and neck carcinoma, testicular cancer, colorectal cancer, prostatic cancer, and pancreatic cancer cell.

17. The method of claim 13, wherein the cancer is glioblastoma.

18. The method of claim 13, wherein the cancer cell is contacted ex vivo.

19. The method of claim 13, wherein the cancer cell is contacted in vivo.

20. The method of claim 19, wherein the chimeric oncolytic virus is administered in a pharmaceutically acceptable carrier.

21. The method of claim 16, further comprising administering chemotherapy or radiation therapy to the subject.

22. The method of claim 16, wherein the tumor-associated antigen is one found on the cancer being treated.

23. The method of claim 16, wherein tumor-associated antigen is EphA2.

24. The method of claim 16, wherein the herpesvirus is an HSV-1 herpesvirus.

25. The method of claim 16, wherein the second viral nucleic acid sequence is a cytomegalovirus (CMV) nucleic acid.

26. The method of claim 16, wherein the herpesvirus includes a fourth nucleic acid sequence encoding a different tumor-associated antigen from that encoded by the third nucleic acid sequence.

27. The method of claim 16, wherein the chimeric oncolytic virus provides a persistent antitumor effect.

28. A method of immunizing a subject against cancer, comprising administering to the subject a chimeric oncolytic virus, comprising:
a herpesvirus having a modified nucleic acid sequence, comprising:
a modification of the herpesvirus gamma (1)34.5 gene (γ₁34.5) or a nucleic acid with at least about 70% homology to the γ₁34.5 gene that reduces its expression;
a second viral nucleic acid sequence encoding a PKR evasion protein that does not cause virulence; and
a third nucleic acid sequence encoding a tumor-associated antigen wherein the chimeric oncolytic virus is administered under conditions effective to immunize the subject against cancer.

29. The method of claim 28, wherein the herpesvirus is an HSV-1 herpesvirus.

30. The method of claim 28, wherein the modification of the herpesvirus γ₁34.5 gene comprises a deletion or mutation of the γ₁34.5 gene.

31. The method of claim 28, wherein the cancer is selected from the group consisting of adenocarcinoma, hepatoblastoma, sarcoma, glioma, glioblastoma, neuroblastoma, plasmacytoma, histiocytoma, melanoma, adenoma, myeloma, bladder cancer, brain cancer, squamous cell carcinoma of the head and neck, ovarian cancer, skin cancer, liver cancer, lung cancer, colon cancer, cervical cancer, breast cancer, renal cancer, esophageal carcinoma, head and neck carcinoma, testicular cancer, colorectal cancer, prostatic cancer, and pancreatic cancer cell.

32. The method of claim 28, wherein the cancer is glioblastoma.

The application's sequence listing, which the Patent Office published only in electronic form, follows.

SEQUENCE LISTING (13 sequences)

SEQ ID NO: 1 - DNA, 747 bp, Herpes Simplex Virus 1
atggcccgccgccgccgccatcgcggcccccgccgcccccggccgcccgggcccacgggcgccgtcccaaccgcacagtcccaggtaacctccacgcccaactcggaacccgcggtcaggagcgcgcccgcggccgccccgccgccgccccccgccggtgggcccccgccttcttgttcgctgctgctgcgccagtggctccacgttcccgagtccgcgtccgacgacgacgatgacgacgactggccggacagccccccgcccgagccggcgccagaggcccggcccaccgccgccgccccccggccccggcccccaccgcccggcgtgggcccggggggcggggctgacccctcccaccccccctcgcgccccttccgccttccgccgcgcctcgccctccgcctgcgcgtcaccgcggagcacctggcgcgcctgcgcctgcgacgcgcgggcggggagggggcgccggagccccccgcgacccccgcgacccccgcgacccccgcgacccccgcgacccccgcgcgggtgcgcttctcgccccacgtccgggtgcgccacctggtggtctgggcctcggccgcccgcctggcgcgccgcggctcgtgggcccgcgagcgggccgaccgggctcggttccggcgccgggtggcggaggccgaggcggtcatcgggccgtgcctggggcccgaggcccgtgcccgggccctggcccgcggagccggcccggcgaactcggtctaa

SEQ ID NO: 2 - DNA, 2541 bp, Human cytomegalovirus
atggcccagcgcaacggcatgtcgccgcgccccccgccccttggtcgcggccgcggggccggagggccttcgggggttggttcctctcctccttcttcttgtgtgccgatgggagcgccgtcaacagcgggcactggtgcgagtgctgcggctacgacgacgccgggccacggcgtccaccgggtagaaccccgcgggccgccgggcgcccctccgagtagcggcaacaatagcaacttttggcacggcccggagcgcctgttgctgtctcagattccggtggagcgccaggcgctgacggagctggaataccaggccatgggcgccgtgtggcgcgcggcgtttttggccaacagcacgggccgcgccatgcgcaagtggtcgcagcgcgacgcgggcacgctgctgccgctcggacggccgtacggattctacgcgcgggtgacgccgcgcagccagatgaacggcgtgggcgcgacggacctgcgtcaactgtcgccgcgggacgcgtggatcgtactggtggctaccgtggtgcacgaggtggaccccgcagccgacccgacggtgggcgacaaggccggccatcccgagggtctgtgcgcgcaggacggactgtacctggcgctgggcgccgggttccgcgtgttcgtgtacgacctggcaaacaacacgctgatcctagcggcgcgcgacgcggacgagtggtttcggcacggcgcgggcgaggtggtgcggctgtaccgctgcaaccggctgggcgtgggcaccccgcgcgcgacgctgctgcctcagccggcgctccgacagacgttgctgcgcgccgaggaggcgacggcgctcggacgggagctgcgccggcggtgggccggcacgacggtggcgctgcagacgccgggcaggcgactgcagccgatggtactgctgggcgcgtggcaggagctggcgcagtacgagccgttcgcgtcggcgccgcaccccgcgtcgctgctgacggccgtgcgtcggcacctgaaccagcgtctgtgctgcggctggctggcgctgggcgcggtgctgcccgcgcggtggctgggctgcgcggcggggccggcgacggggacggcggcggggacgacgtcgccgccagcggcgagcggcacggagacggaggccgccggcggggacgcgccgtgcgcgatagcgggagccgtggggtccgctgtacctgtgcctccgcagccgtacggcgccgccggcgggggcgcgatttgcgtgcctaacgcggacgcgcacgcggtggtcggggcggacgcggcagcagcagcggcgccgacggtgatggtgggttcgacagcgatggcgggtccggcggcgtcggggaccgtgccgcgcgccatgctggtggtgctgctggacgagctgggcgccgtgttcgggtactgcccgctggacgggcacgtgtacccgctggcggcggagctgtcgcactttctgcgcgcgggcgtgctgggcgcgctggcgctgggacgcgagtcggcgcccgccgccgaggccgcgcggcggctgctgcccgagctggaccgcgagcagtgggagcggccgcgctgggacgcgctgcacctgcacccgcgcgccgcgctgtgggcgcgcgagccgcacgggcagtgggagttcatgtttcgcgaacaacgcggtgaccccataaatgatcccctcgcatttcgtctttcggacgctcgaactctcggtctcgacctcaccaccgtcatgacagagcgtcaaagtcaattgcccgaaaagtatatcggtttctatcagattaggaaacctccttggctcatggaacaacctccacccccatctcgccaaaccaaaccggacgctgcaacgatgcccccaccgctcagtgctcaggcaagcgtcagctacgcgctccgatacgatgacgagtcctggcgcccgctcagcacagttgacgaccacaaagcctggttggatctcgacgaatcacattgggtcctcggggacagccgacccgacgatataaaacaacgcagactgctgaaggccactcaacgacgaggcgccgaaatcgacagacccatgcctgtcgtgcctgaagaatgttacgaccaacgcttcactaccgaaggccaccaggtcatcccgttgtgcgcgtccgaacccgaggatgacgacgaagatcctacctacgacgaattgccgtcgcgcccaccccagaaacataagccgccagacaaacctccgcgcttatgcaaaacgggccccggcccacctccgctgccgccaaagcaacggcacggttccaccgacggaaaagtttctgcgccccgacagtcggagcatcataaaagacagacccgaccgccaaggccgccaccgcccaaattcggggatagaaccgcggcccatctctcgcaaaatatgcgggacatgtacctcgatatgtgtacatcttcgggccacaggccacggccgccagcacctccgcggccgaaaaaatgtcaaacacacgcccctcaccacgttcatcattga

SEQ ID NO: 3 - DNA, 2367 bp, Human cytomegalovirus
ttattgagcattgtaatggtagtgtgtggctatattagaaaacgtgacgcgtcgcatgtcgcggcacaatctggcagcggggtcggggtagggtacggtgggaggcatgtacacagatggaacaaaagcagaagtaacgtgagaaggagcatacagtccagtatccagcggttcctgagtagcaccacccatcaactgaatgccctcatgagtaaaagtctgcgggcgacagcccttggggaccgttggcatgggacgatcaatctccaaaccacagcgtaacaccgttttcttccaacgtcgttgatagacgtcgtttttacggttactcccaagaacccagaaagtctcgtccaagtcgtaccaggaatcttctccggggagacgcgacggtttccaatcctcgtcgtctcgtctcaaagcacgtcccaaactggcttgaggagtcaacggtggttctgtgggtcgggtgtagcgcgagtgttttcccttcatgagcgattcatcctccttgcctttaggctttttggtctttttgtgtatcatctggccgccggcctccataaccaccgtggccaagtccagtcccagagcttgagcgtcggcgcggcgtcgggcgtcttgcaggtagtcttccacatttgcacagatggccgggtgtttggtggctagggtgaggacctcagcctcgccgcgacccggacgtagcaaaaaagccaactgcccgtgcggctcgcgcgcccacagcgcggcgcgcgggtgcaggtgcagcgcgtcccagcgcggccgctcccactgctcgcggtccagctcgggcagcagccgccgcgcggcctcggcggcgggcgccgactcgcgtcccagcgccagcgcgcccagcacgcccgcgcgcagaaagtgcgacagctccgccgccagcgggtacacgtgcccgtccagcgggcagtacccgaacacggcgcccagctcgtccagcagcaccaccagcatggcgcgcggcacggtccccgacgccgccggacccgccatcgctgtcgaacccaccatcaccgtcggcgccgctgctgctgccgcgtccgccccgaccaccgcgtgcgcgtccgcgttaggcacgcaaatcgcgcccccgccggcggcgccgtacggctgcggaggcacaggtacagcggaccccacggctcccgctatcgcgcacggcgcgtccccgccggcggcctccgtctccgtgccgctcgccgctggcggcgacgtcgtccccgccgccgtccccgtcgccggccccgccgcgcagcccagccaccgcgcgggcagcaccgcgcccagcgccagccagccgcagcacagacgctggttcaggtgccgacgcacggccgtcagcagcgacgcggggtgcggcgccgacgcgaacggctcgtactgcgccagctcctgccacgcgcccagcagtaccatcggctgcagtcgcctgcccggcgtctgcagcgccaccgtcgtgccggcccaccgccggcgcagctcccgtccgagcgccgtcgcctcctcggcgcgcagcaacgtctgtcggagcgccggctgaggcagcagcgtcgcgcgcggggtgcccacgcccagccggttgcagcggtacagccgcaccacctcgcccgcgccgtgccgaaaccactcgtccgcgtcgcgcgccgctaggatcagcgtgttgtttgccaggtcgtacacgaacacgcggaacccggcgcccagcgccaggtacagtccgtcctgcgcgcacagaccctcgggatggccggccttgtcgcccaacgtcgggtcggctgcggggtccacctcgtgcaccacggtagccaccagtacgatccacgcgtcccgcggcgacagttgacgcaggtccgtcgcgcccacgccgttcatctggctgcgcggcgtcacccgcgcgtagaatccgtacggccgtccgagcggcagcagcgtgcccgcgtcgcgctgcgaccacttgcgcatggcgcggcccgtgctgttggccaaaaacgccgcgcgccacacggcgcccatggcctggtattccagctccgtcagcgcctggcgctccaccggaatctgagacagcaacaggcgctccgggccgtgccaaaagttgctattgttgccgctactcggaggggcgcccggcggcccgcggggttctacccggtggacgccgtggcccggcgtcgtcgtagccgcagcactcgcaccagtgcccgctgtggacggcgctcccatcggcacacaagaagaaggaggagaggaaccaacccccgaaggccctccggccccgcggccgcgaccaaggggcggggggcgcggcgacatgccgttgcgctgggccat

SEQ ID NO: 4 - DNA, 390 bp, Human cytomegalovirus
atggcccagcgcaacggcatgtcgccgcgccccccgccccttggtcgcggccgcggggccggagggccttcgggggttggttcctctcctccttcttcttgtgtgccgatgggagcgccgtccacagcgggcactggtgcgagtgctgcggctacgacgacgccgggccacggcgtccaccgggtagaaccccgcgggccgccgggcgcccctccgagtagcggcaacaatagcaacttttggcacggcccggagcgcctgttgctgtctcagattccggtggagcgccaggcgctgacggagctggaataccaggccatgggcgccgtgtggcgcgcggcgtttttggccaacagcacgggccgcgccatgcgcaagtggtcgcagcgc

SEQ ID NO: 5 - DNA, 162562 bp, Artificial Sequence
  C170  from-HSV-C134, the Complete Viral Genome v1 Chimeric HSV expressing EphA2 Full-ML
agcccgggccccccgcgggcggggcggcgcgcaaaaaaggcgggcggcggtccgggcggcgtgcgcgcgcgcggcgggcgttggggagcggggggaggagcggggggaggagcggggggaggagcggggggaggagcggggggaggagcggggggaggagcggggggaggagcggggggaggagcggggggaggagcggggggaggagcggggggaggagcggggggaggagcggggggaggagcggggggaggagcggggggaggagcggggggaggagcggggggaggagcggggggaggagcggaaaacgggccccccccgaaacacaccccccgggggtcgcgcgcggccctttaaagcgcggcggcgcagcccgggccccccgcggccgagacgagcgagttagacaggcaagcactactcgcctctgcacgcacatgcttgcctgtcaaactctaccaccccggcacgctctctgtctccatggcccgccgccgccgccatcgcggcccccgccgcccccggccgcccgggcccacgggcgccgtcccaaccgcacagtcccaggtaaccgcctatgggaatgaaagaccccacctgtaggtttggcaagctaggatcaaggtcaggaacagagaaacaggagaatatgggccaaacaggatatctgtggtaagcagttcctgccccgctcagggccaagaacagttggaacaggagaatatgggccaaacaggatatctgtggtaagcagttcctgccccgctcagggccaagaacagatggtccccagatgcggtcccgccctcagcagtttctagagaaccatcagatgtttccagggtgccccaaggacctgaaatgaccctgtgccttatttgaactaaccaatcagttcgcttctcgcttctgttcgcgcgcttctgctccccgagctctatataagcagagctggtttagtgaaccgtcagatcgcctggagacgccatccacgctgttttgacctccatagaagacaccgactctagctagaggatctcctaggaagctggccgcacaaagtggtaccggatcccgggtcgaccatggagctccgggcagtcggtttctgcctggcgctgctgtggggttgcgcgctggcggccgcggcggcacagggaaaggaagttgttttgttggacttcgcagcaatgaagggagagctcggctggctcacgcacccctatggcaaagggtgggacctgatgcagaacatcatggacgacatgcctatctacatgtactcggtgtgcaacgtggtatccggcgaccaggacaactggctccgcaccaactgggtgtaccgggaggaggccgagcgcatctttattgagctcaagttcacggtgcgagactgtaacagcttcccgggtggcgccagctcatgcaaagagaccttcaacctctactatgcagagtcagatgtggactatggcaccaacttccagaagcgccagttcaccaagattgacaccatcgcccctgacgagatcacggtcagcagtgacttcgaggctcgcaatgtcaagctgaacgtagaggagcgcatggtggggccccttacccggaagggcttctacctggccttccaggacatcggcgcctgcgtggcgctgctctccgttcgcgtctactacaagaagtgtcccgagatgctgcagagcttggctcgcttccccgagaccattgctgtcgctgtctccgatacacaacccctggccacggtggccggtacctgcgtggaccatgccgtggtgccttatgggggcgaggggcctctcatgcactgcacggtggatggcgagtggctggtgcccatcgggcagtgcctgtgccaggaaggctacgagaaggtcgaggatgcctgccgagcctgttctccaggattcttcaagtctgaggcatctgagagcccttgcctggagtgtccagagcataccctgccatccacagagggtgccacctcctgccagtgtgaagaaggctatttcagggcacctgaggacccactgtccatgtcttgcacacgtccaccctctgcccccaactacctcacggccattggcatgggtgccaaagtagaactgcgttggacagctcccaaggacactggtggccgccaggacattgtctacagtgtcacttgcgaacagtgctggccagagtctggcgagtgtgggccctgtgaggcgagcgtgcgctattcagaacctcctcacgccctgacccgcacgagtgtgacagtcagtgacctggagccccacatgaactataccttcgctgtcgaagcacgcaatggtgtctcaggcctggtgactagccgaagcttccggactgccagcgtcagtattaaccaaacagagccccccaaagtgaggctggaggaccgaagcaccacctccctgagtgtcacctggagcatcccggtgtcacagcagagccgtgtgtggaagtacgaagtcacctaccgcaagaagggggatgccaacagctataatgtgcgccgcacggaaggcttctccgtgaccctggatgaccttgctccggataccacgtacctggtgcaggtgcaggcgctgacgcaggagggccagggagccggcagcaaagtgcacgagttccagacactgtccacggaaggatctgccaacatggcggtgatcggcggtgtggctgtaggtgttgttttgcttctggtactggcaggagttggcctcttcatccatcgaaggaggaggaacctgcgggctcgccagtcctctgaggatgtccgtttttccaagtcagaacaactaaagcccctgaagacctatgtggatcctcacacttacgaagaccccaaccaggctgtactcaagtttaccaccgagatccacccatcctgtgtggcaaggcagaaggtcattggagcaggagagtttggagaggtctataaagggacgctgaaggcatcctcggggaagaaggagataccggtggccatcaagacactgaaagcgggctacactgagaagcagcgggtggacttcctgagcgaggccagcatcatgggccagtttagccaccacaatatcatccgcctggagggcgtggtctctaaatacaaacccatgatgattatcacagagtacatggagaatggagcgctagacaagttccttagggagaaggatggtgagttcagtgtacttcagttggtgggcatgctgaggggtatcgcatccggcatgaagtacctggccaacatgaactacgtgcaccgggacctggccgcccgcaacatcctcgtcaacagcaacctggtgtgcaaggtgtccgattttggcctgtcgcgtgtgctggaagatgaccccgaggccacctacaccacaagtggcggcaagatccctattcgatggacagccccagaggccatttcctaccgcaagttcacctcagccagcgatgtgtggagctacggcattgtcatgtgggaagtgatgacttatggcgaacggccctactgggaactgtcaaaccacgaggtcatgaaagccatcaacgacggcttccggctccctacgcccatggactgcccttcagccatttaccagctcatgatgcagtgctggcagcaagagcgctcccgccgacccaagtttgccgacatcgttagcatcctggacaagctcatccgagcccccgactccctcaagacgctggctgactttgatccccgagtgtccatccggctgcccagcaccagcggctcggagggagtccccttccgtacggtgtccgagtggctggagagcatcaagatgcaacagtacacggaacacttcatggtggctggctacacggccatcgagaaggtggtacagatgtccaacgaagacatcaaaaggatcggagtgcgtcttcctggccaccagaagcgtattgcctacagcctgctgggactcaaggaccaggtcaacacagtggggattcctatcgggaattcagaacaaaaactcatctcagaagaagatctaggaggcggcgggtcaggtggaggtggctctggcggtggcggttaaaattccgactcactatagggcgaattaattccggagatctctagatccggagagacgatggcaggagccgcgcatatatacgcttggagccagcccgccctcacagggcgggccgcctcgggggcgggactggccaatcggcggccgccagcgcggcggggcccggccaaccagcgtccgccgagtcttcggggcccggcccattgggcgggagttaccgcccaatgggccgggccgcccacttcccggtatggtaattaaaaacttgcaagaggccttgttccgcttcccggtatggtaattagaaactcattaatgggcggccccggccgcccttcccgcttccggcaattcccgcggcccttaatgggcaaccccggtattccccgcctcccgcgccgcgcgtaaccactcccctggggttccgggttatgctaattgcttttttggcggaacacacggcccctcgcgcattggcccgcgggtcgctcaatgaacccgcattggtcccctggggttccgggtatggtaatgagtttcttcgggaaggcgggaagccccggggcaccgacgcaggccaagcccctgttgcgtcggtgggaggggcatgctaatggggttctttgggggacaccgggttggtcccccaaatcgggggccgggccgtgcatgctaatgatattctttgggggcgccgggttggtccccggggacggggccgccccgcggtgggcctgcctcccctgggacgcgcggccattgggggaatcgtcactgccgcccctttggggaggggaaaggcgtggggtataagttagccctggcccgacagtctggtcgcatttgcacctcggcactcggagcgagacgcagcagccaggcagactcgggccgccccctctccgcatcaccacagaagccccgcctacgttgcgacccccagggaccctccgtccgcgaccctccaaccgcatacgacccccatggagccccgccccggagcgagtacccgccggcctgagggccgcccccagcgcgaggtgaggggccgggcgccatgtctggggcgccatattggggggcgccatattggggggcgccatgttgggggacccccgacccttacactggaaccggccgccatgttgggggacccccactcatacacgggagccgggcgccatgttagggggcgtggaaccccgtgacactatatatacagggaccgggggcgccatgttagggggcgcggaaccccctgaccctatatatacagggaccggggtcgccctgttgggggtcgccatgtgaccccctgactttatatatacagaccccccaacacatacacatggcccctttgactcagacgcagggcccggggtcgccgtgggaccccctgactcatacacagagacacgcccccacaacaaacacacagggaccggggtcgccgtgttagggggcgtggtccccactgactcatacgcagggcccccttactcacacgcatctaggggggtggggaggagccgcccgccatatttgggggacgccgtgggacccccgactccggtgcgtctggagggcgggagaagagggaagaagaggggtcgggatccaaaggacggacccagaccacctttggttgcagacccctttctcccccctcttccgaggccagcaggggggcaggactttgtgaggcggggggggggagagggggaactcgtgggcgctgattgacgcgggaaatccccccattcttacccgcccccctttttttccccttagcccgccccggatgtctgggtgtttccctgcgaccgagacctgccggacagcagcgactctgaggcggagaccgaagtgggggggcggggggacgccgaccaccatgacgacgactccgcctccgaggcggacagcacggacacggaactgttcgagacggggctgctggggccgcagggcgtggatgggggggcggtctcgggggggagccccccccgcgaggaagaccccggcagttgcgggggcgccccccctcgagaggacggggggagcgacgagggcgacgtgtgcgccgtgtgcacggatgagatcgcgccccacctgcgctgcgacaccttcccgtgcatgcaccgcttctgcatcccgtgcatgaaaacctggatgcaattgcgcaacacctgcccgctgtgcaacgccaagctggtgtacctgatagtgggcgtgacgcccagcgggtcgttcagcaccatcccgatcgtgaacgacccccagacccgcatggaggccgaggaggccgtcagggcgggcacggccgtggactttatctggacgggcaatcagcggttcgccccgcggtacctgaccctgggggggcacacggtgagggccctgtcgcccacccaccctgagcccaccacggacgaggatgacgacgacctggacgacggtgaggcgggggggcggcgaggaccctgggggaggaggaggaggaggggggagggaggaataggcgggcgggggggcgaggaaagggcgggcgcggaaagggagggcctgggagggggcgtaacctgatcgcgccccccgttgtctcttgcagcagactacgtaccgcccgccccccgccggacgccccgcgcccccccacgcagaggcgccgccgcgccccccgtgacgggcggggcgtctcacgcagccccccagccggccgcggctcggacagcgcccccctcggcgcccatcgggccacacggcagcagtaacaccaacaccaccaccaacagcagcggcggcggcggcggctcccgccagtcgcgagccgcggcgccgcggggggcgtctggcccctccgggggggttggggttggggttggggttgttgaagcggaggcggggcggccgaggggccggacgggcccccttgtcaacagacccgccccccttgcaaacaacagagaccccatagtgatcagcgactcccccccggcctctccccacaggccccccgcggcgcccatgccaggctccgccccccgccccgggcccaccgcgtcctcggccgcgtcgggacccgcgcgcccccgcgcggccgtggccccgtgcgtgcgagcgccgcctccggggcccggcccccgcgccccggcccccgcggacgcgcgccgtgtgccccagtcgcactcgtccctggctcaggccgcgaaccaagaacagagtctgtgccgggcgcgtgcgacggtggcgcgcggctcgggggggccgggcgtggagggtggacacgggccctcccgcggcgccgccccctccggcgcccccccgctcccctccgccgcctctgtcgagcaggaggcggcggtgcgtccgaggaagaggcgcgggtcgggccaggaaaacccctccccccagtccacgcgtccccccctcgcgccggcaggggccaagagggcggcgacgcaccccccctccgactcagggccgggggggcgcggccagggtgggcccgggacccccctgacgtcctcggcggcctccgcctcttcctcctctgcctcttcctcctcggccccgactcccgcgggggccgcctcttccgccgccggggccgcgtcctcctccgcttccgcctcctcgggcggggccgtcggtgccctgggagggagacaagaggaaacctccctcggcccccgcgctgcttctgggccgcgggggccgaggaagtgtgcccggaagacgcgccacgcggagacttccggggccgcccccgcgggcggcctcacgcgctacctgcccatctcgggggtctctagcgtggtcgccctgtcgccttacgtgaacaagacgatcacgggggactgcctgcccatcctggacatggagacggggaacatcggggcgtacgtggtcctggtggaccagacgggaaacatggcgacccggctgcgggccgcggtccccggctggagccgccgcaccctgctccccgagaccgcgggtaaccacgtgatgccccccgagtacccgacggcccccgcgtcggagtggaacagcctctggatgacccccgtggggaacatgctgttcgaccagggcaccctagtgggcgccctggacttccgcagcctgcggtctcggcacccgtggtccggggagcagggggcgtcgacccgggacgagggaaaacaataagggacgccccccgtgtttgtggggaggggggggtcgggcgctgggtggtctctggccgcgcccactacaccagccaatccgtgtcggggaggggaaaagtgaaagacacgggcaccacacaccagcgggtctttagtgttggccctaataaaaaactcaggggatttttgctgtctattgggaaataaaggtttacttttgtatcttttccctgtctgtgttggatggatctcgggggtgcgtgggagtgggggtgcgtgggagtgggggtgcgtgggagtgggggtgcgtgggagtgggggtgcgtgggagtgggggtgcgtgggagtgggggtgcgtgggagtgggggtgcgtgggagtgggggtgcgtgggagtgggggtgccatgttgggcaggctctggtgttaaccacagagccgcggcccgggctgcctgaccaccgatccccgaaagcatcctgccactggcatggagccagaaccacagtgggttgggtgtgggtgttaagtttccgcgagcgcctgcccgcccggactgacctggcctctggccgccacaaagggcgggggggggttaactacactatagggcaacaaaggacgggaggggtggcggggcgggacggggcgcccaaaagggggtcggccacaccacagacgtgggtgttggggggtggggcggaggggtggggggggagacagaaacaggaacatagttagaaaacaagaatgcggtgcagccagagaatcacaggagacgaggggatgggcgtgttggttaccaacccacacccaggcatgctcggtggtatgaaggagggggggcggtgcttcttagagaccgccgggggacgtggggttggtgtgcagaggcacgcgcacccgcgtcggccaggtgggccggtaccccatcccccctcccccgacccttcccacccccgcgtgccagagatcaccccggtcccccggcacccgccactcctccatatcctcgctttaggaacaactttagggggggtacacacgcgccgtgcatttccttccacaccccccctcccccgcactcccccccccccggcagtaagacccaagcatagagagccaggcacaaaaacacaggcggggtgggacacatgccttcttggagtacgtgggtcattggcgtggggggttacagcgacaccggccgaccccctggcggtcttccagccggcccttagataagggggcagttggtggtcggacgggtaagtaacagagtctgactaagggtgggagggggggaaaagaacgggctggtgtgctgtaacacgagcccacccgcgagtggcgtggccgaccttagcctctggggcgccccctgtcgtttgggtcccccccctctattggggagaagcaggtgtctaacctacctggaaacgcggcgtctttgttgaaccacaccggggcgcccttgacgagtgggataacgggggaggaagggagggaggagggtactgggggtgaagaaggggggggggggagaagcgagaacaggaaaggcgacggagcccgacaaaacaccgagaaaaaaaaaccacagcgcatgcgccgggccgttgtggggccccgggccggggccccttgggtccgccggggccccgggccgggccgccacgggggccggccgttggcggtaaccccgattgtttatctcaggccccgggccgggaacccggaaaagcctccggggggcctttttcgcgtcgcgtgccggcgagcgggcccggacggggcccggaccgccgcggtcgggggccccctcgtcccgggccgtacgcggccttcgccccgtgaggggacagacgaacgaaacattccggcgacggaacgaaaaacaccccagacgggttaaagaaacagaaaccgcaaccccccccacccccgaaacggggaaaacaaaaaacagaccagcggccggccggcgcttagggggaggatgtcgccgacgccccttggccgccccggctgcaggggggcccggagagccgcggcacccggacgcgcccggaaagtctttcgcaccacccgcgatcggcacggccgcgcccccgcttttataaaggctcagatgacgcagcaaaaacaggccacagcaccacgtgggtaggtgatgtaattttattttcctcgtctgcggcctaatggatttccgggcgcggtgcccctgtctgcagagcacttaacggattgatatctcgcgggcacgcgcgcccttaatggaccggcgcggggcggggggccggatacccacacgggcgggggggggggtgtcgcgggccgtctgctggcccgcggccacataaacaatgactctgggcctttctgcctctgccgcttgtgtgtgcgcgcgccggctctgcggtgtcggcggcggctgcggcggctgcggcggccgccgtgttcggtctcggtagccggccggcgggtggactcgcggggggccggagggtggaaggcaggggggtgtaggatgggtatcaggacttccacttcccgtccttccatcccccgttcccctcggttgttcctcgcccccccccacaccccgccgctttccgttggggttgttattgttgtcgggatcgtgcgggccgggggtcgccggggcaggggcgggggcgggggtgctcgtcgatcgaccgggctcagtgggggcgtggggtgggggggaaaaggcgaagagactgggggtgggggggggtgtcgggggtggctgtttttttttgtgggtgttttttgtggctgttcccgtcccccgtcacccccctccctccgtccccccgtcgcgggtgtttgtgtttgtttattccgacatcggtttatttaaataaacacagccgttctgcgtgtctgttcttgcgtgtggctgggggcttatatgtggggtcccgggggcgggatggggtttagcggcggggggcggcgcgccggacggggcgctggagataacggcccccggggaacgggggaccggggctgggtctcccgaggtgggtgggtgggcggcggtggccgggccgggccgggccgggtgggcggggtttggaaaaacgaggaggaggaggaggagaaggagggggggggagacggggggaaagcaaggacacggcccggggggtgggagcgcgggccgggccgctcgtaagagccgcgacccggccgccggggagcgttgtcgccgtcggtctgccggcccccgtccctcccttttttgaccaaccagcgcccccccccctcaccaccattcctaccaccaccaccaccaccgacacctcccgcacacccccgcccacactccccccccccacccaacccgcaccacgagcacgggttgggggtagcaggggatcaaaggggggcaaggccggcggggcggttcgggggcgggggcgggagaccgagtaggccccgcccatccgcggcccctcccggcagccacgccccccagcgtcgggtgtcacggggaaagagcagggggagaggggagagggggggagaggggagagggggggagaggggagagggggggagaggggagagggggggagaggggagagggggggagaggggagagggggggagaggggagagggggggagaggggagagggggggagaggggagagggggggagaggggagagggggggagagggggtatataaaccaacgaaaagcgcgggaacggggatacggggcttgtgtggcacgacgtcgtggttgtgttactgggcaaacacttggggactgtaggtttctgtgggtgccgaccctaggcgctatggggattttgggttgggtcgggcttattgccgttggggttttgtgtgtgcgggggggcttgtcttcaaccgaatatgttattcggagtcgggtggctcgagaggtgggggatatattaaaggtgccttgtgtgccgctcccgtctgacgatcttgattggcgttacgagaccccctcggctataaactatgctttgatagacggtatatttttgcgttatcactgtcccggattggacacggtcttgtgggataggcatgcccagaaggcatattgggttaacccctttttatttgtggcgggttttttggaggacttgagtcaccccgcatttcctgccaacacccaggaaacagaaacgcgcttggccctttataaagagatacgccaggcgctggacagtcgcaagcaggccgccagccacacacctgtgaaggctgggtgtgtgaactttgactattcgcgcacccgccgctgtgtagggcgacaggatttgggacctaccaacggaacgtctggacggaccccggttctgccgccggacgatgaagcgggcctgcagccgaagcccctcaccacgccgccgcccatcatcgccacgttggaccccaccccgcgacgggacgccgccgcaaaaagcagacgccgacgaccccactcccggcgcatctaatgatgccgcgacggaaacccgtccgggttcggggggcgaaccggccgcctgtcgctcgtcagggccggcgggcgctcctcgccgccctagaggctgtcccgctggtgtgacgttttcctcgtccgcgccccccgaccctcccatggatttaacaaacgggggggtgtcgcctgtggcgacctcggcgcctctggactggaccacgtttcggcgtgtgtttctgatcgacgacgcgtggcggcccctgttggagcctgagctggcgaaccccttaaccgcccacctcctgaccgaatataatcgtcggtgccagaccgaagaggtgctgccgccgcgggaggatgtgttttcgtggactcgttattgcacccccgacgaggtgcgcgtggttatcatcggccaggacccatatcaccaccccggccaggcgcacggacttgcgtttagcgtgcgcgcgaacgtgccgcctcccccgagtcttcggaatgtcttggcggccgtcaagaactgttatcccgaggcacggatgagcggccacggttgcctggaaaagtgggcgcgggacggcgtcctgttactaaacacgaccctgaccgtcaagcgcggggcggcggcgtcccactctagaatcggttgggaccgcttcgtgggcggagttatccgccggttggccgcgcgccgccccggcctggtgtttatgctctggggcgcacatgcccagaatgccatcaggccggaccctcgggtccattgcgtcctcaagttttcgcacccgtcgcccctctccaaggttccgttcggaacatgccagcatttcctcgtggcgaatcgatatctcgagacccggtcgatttcacccatcgactggtcggtttgaaaggcatcgacgtccggggttttcgtctgtgggggcttttgggtatttccgatgaataaagacggttaatggttaaacctctggtctcatacgggtcggtgatgtcgggcgtcgggggagagggagttccctctgcgcttgcgattctagcctcgtggggctggacgttcgacacgccaaaccacgagtcagggatatcgccagatacgactcccgcagattccattcggggggccgctgtggcctcacctgaccaacctttacacgggggcccggaacgggaggccacagcgccgtctttctccccaacgcgcgcggatgacggcccgccctgtaccgacgggccctacgtgacgtttgataccctgtttatggtgtcgtcgatcgacgaattagggcgtcgccagctcacggacaccatccgcaaggacctgcggttgtcgctggccaagtttagcattgcgtgcaccaagacctcctcgttttcgggaaacgccccgcgccaccacagacgcggggcgttccagcgcggcacgcgggcgccgcgcagcaacaaaagccttcagatgtttgtgttgtgcaaacgcacccacgccgctcgagtgcgagagcagcttcgggtcgttattcagtcccgcaagccgcgcaagtattacacgcgatcttcggacgggcggctctgccccgccgtccccgtgttcgtccacgagttcgtctcgtccgagccaatgcgcctccaccgagataacgtcatgctggcctcgggggccgagtaaccgcccccccgcgccaccctcactgcccgtcgcgcgtgtttgatgttaataaataacgcataaattatcttaatagatctcccgatcccctatggtgcactctcagtacaatctgctctgatgccgcatagttaagccagtatctgctccctgcttgtgtgttggaggtcgctgagtagtgcgcgagcaaaatttaagctacaacaaggcaaggcttgaccgacaattgcatgaagaatctgcttagggttaggcgttttgcgctgcttcgcgatgtacgggccagatatacgcgttgacattgattattgactagttattaatagtaatcaattacggggtcattagttcatagcccatatatggagttccacgttacataacttacggtaaatggcccgcctggctgaccgcccaacgacccccgcccattgacgtcaataatgacgtatgttcccatagtaacgccaatagggactttccattgacgtcaatgggtggagtatttacggtaaactgcccacttggcagtacatcaagtgtatcatatgccaagtacgccccctattgacgtcaatgacggtaaatggcccgcctggcattatgcccagtacatgaccttatgggactttcctacttggcagtacatctacgtattagtcatcgctattaccatggtgatgcggttttggcagtacatcaatgggcgtggatagcggtttgactcacggggatttccaagtctccaccccattgacgtcaatgggagtttgttttggcaccaaaatcaacgggactttccaaaatgtcgtaacaactccgccccattgacgcaaatgggcggtaggcgtgtacggtgggaggtctatataagcagagctctctggctaactagagaacccactgcttactggcttatcgaaattaatacgactcactatagggagacccaagctggctagttaagcttggtaccgagctcggatccactagtccagtgtggtggaattgcccttggatcctcaatggcccagcgcaacggcatgtcgccgcgccccccgcccctcggtcgcggccgcggggccggagggccttcgggggttggttcctctcctccttcttcttgtgtgccgatgggagcgccgtccacagcgggcactggtgcgagtgctgcggctacgacgacgccgggccacggcgtccaccgggtagaaccccgcgggccgccgggcgcccctccgagtagcgacaacaatggcaacttttggcacggcccggagcgcctgttgctgtctcagattccggtggagcgccaggcgctgacggagctggaataccaggccatgggcgccgtgtggcgcgcggcgtttttggccaacagcacgggccgcgccatgcgcaagtggtcgcagcgcgacgcgggcacgctgctgccgctcggacggccgtacggattctacgcgcgggtgacgccgcgcagccagatgaacggcgtgggcgcgacggacctgcgtcaactgtcgccgcgggacgcgtggatcgtactggtggctaccgtggtgcacgaggtggaccccgcagccgacccgacgttgggcgacaaggccggccatcccgagggtctgtgcgcgcaggacggactgtacctggcgctgggcgccgggttccgcgtgttcgtgtacgacctggcaaacaacacgctgatcctagcggcgcgcgacgcggacgagtggtttcggcacggcgcgggcgaggtggtgcggctgtaccgctgcaaccggctgggcgtgggcaccccgcgcgcgacgctgctgcctcagccggcgctccgacagacgttgctgcgcgccgaggaggcgacggcgctcggacgggagctgcgccggcggtgggccggcacgacggtggcgctgcagacgccgggcaggcgactgcagccgatggtactgctgggcgcgtggcaggagctggcgcagtacgagccgttcgcgtcggcgccgcaccccgcgtcgctgctgacggccgtgcgtcggcacctgaaccagcgtctgtgctgcggctggctggcgctgggcgcggtgctgcccgcgcggtggctgggctgcgcggcggggccggcgacggggacggcggcggggacgacgtcgccgccagcggcgagcggcacggagacggaggccgccggcggggacgcgccgtgcgcgatagcgggagccgtggggtccgctgtacctgtgcctccgcagccgtacggcgccgccggcgggggcgcgatttgcgtgcctaacgcggacgcgcacgcggtggtcggggcggacgcggcagcagcagcggcgccgacggtgatggtgggttcgacagcgatggcgggtccggcggcgtcggggaccgtgccgcgcgccatgctggtggtgctgctggacgagctgggcgccgtgttcgggtactgcccgctggacgggcacgtgtacccgctggcggcggagctgtcgcactttctgcgcgcgggcgtgctgggcgcgctggcgctgggacgcgagtcggcgcccgccgccgaggccgcgcggcggctgctgcccgagctggaccgcgagcagtgggagcggccgcgctgggacgcgctgcacctgcacccgcgcgccgcgctgtgggcgcgcgagccgcacgggcagtgggagttcatgtttcgcgaacaacgcggtgaccccataaatgatcccctcgcatttcgtctttcggacgctcgaactctcggtctcgacctcaccaccgtcatgacagagcgtcaaagtcaattgcccgaaaagtatatcggtttctatcagattaggaaacctccttggctcatggaacaacctccacccccatctcgccaaaccaaaccggacgctgcaacgatgcccccaccgctcagtgctcaggcaagcgtcagctacgcgctccgatacgatgacgagtcctggcgcccgctcagcacagttgacgaccacaaagcctggttggatctcgacgaatcacattgggtcctcggggacagccgacccgacgatataaaacaacgcagactgctgaaggccactcaacgacgaggcgccgaaatcgacagacccatgcctgtcgtgcctgaagaatgttacgaccaacgcttcactaccgaaggccaccaggtcatcccgttgtgcgcgtccgaacccgaggatgacgacgaagatcctacctacgacgaattgccgtcgcgcccaccccagaaacataagccgccagacaaacctccgcgcttatgcaaaacgggccccggcccacctccgctgccgccaaagcaacggcacggttccaccgacggaaaagtttctgcgccccgacagtcggagcatcataaaagacagacccgaccgccaaggccgccaccgcccaaattcggggatagaaccgcggcccatctctcgcaaaatatgcgggacatgtacctcgatatgtgtacatcttcgggccacaggccacggccgccagcacctccgcggccgaaaaaatgtcaaacacacgcccctcaccacgttcatcataagcttaagggcaattctgcagatatccagcacagtggcggccgctcgagtctagagggcccgcggttcgaaggtaagcctatccctaaccctctcctcggtctcgattctacgcgtaccggtcatcatcaccatcaccattgagtttaaacccgctgatcagcctcgactgtgccttctagttgccagccatctgttgtttgcccctcccccgtgccttccttgaccctggaaggtgccactcccactgtcctttcctaataaaatgaggaaattgcatcgcattgtctgagtaggtgtcattctattctggggggtggggtggggcaggacagcaagggggaggattgggaagacaatagcaggcatgctggggatgcggtgggctctatggcttctgaggcggaaagaaccagctggggctctagggggtatccccacgcgccctgtagcggcgcattaagcgcggcgggtgtggtggttacgcgcagcgtgaccgctacacttgccagcgccctagcgcccgctcctttcgctttcttcccttcctttctcgccacgttcgccggctttccccgtcaagctctaaatcgggggctccctttagggttccgatttagtgctttacggcacctcgaccccaaaaaacttgattagggtgatggttcacgtagtgggccatcgccctgatagacggtttttcgccctttgacgttggagtccacgttctttaatagtggactcttgttccaaactggaacaacactcaaccctatctcggtctattcttttgatttataagggattttgccgatttcggcctattggttaaaaaatgagctgatttaacaaaaatttaacgcgaattaattctgtggaatgtgtgtcagttagggtgtggaaagtccccaggctccccagcaggcagaagtatgcaaagcatgcatctcaattagtcagcaaccaggtgtggaaagtccccaggctccccagcaggcagaagtatgcaaagcatgcatctcaattagtcagcaaccatagtcccgcccctaactccgcccatcccgcccctaactccgcccagttccgcccattctccgccccatggctgactaattttttttatttatgcagaggccgaggccgcctctgcctctgagctattccagaagtagtgaggaggcttttttggaggcctagtattaaggaatttggctggttgtttgttgtctttaatggaccgcccgcagggggggtggcatttcagtgtcgggtgacgagcgcgatccggccgggatcctaggaccccaaaagtttgtctgcgtattccagggcggggctcagttgaatctcccgcagcacctctaccagcaggtccgcggtgggctggagaaactcggccgtcccggggcaggcggtcgtcgggggtggaggcgcggcgcccaccccgtgtgccgcgcctggcgtctcctctgggggcgacccgtaaatggttgcagtgatgtaaatggtgtccgcggtccagaccacggtcaaaatgccggccgtggcgctccgggcgctttcgccgcgcgaggagctgacccaggagtcgaacggatacgcgtacatatgggcgtcccacccgcgttcgagcttctggttgctgtcccggcctataaagcggtaggcacaaaattcggcgcgacagtcgataatcaccaacagcccaatgggggtgtgttggataacaacgcctccgcgcggcaggcggtcctggcgctcccggccccgtaccatgatcgcgcgggtgccgtactcaaaaacatgcaccacctgcgcggcgtcgggcagtgcgctggtcagcgaggccctggcgtggcataggctatacgcgatggtcgtctgtggattggacatctcgcggtgggtagtgagtcccccgggccgggttcggtggaactgtaaggggacggcgggttaatatacaatgaccacgttcggatcgcgcagagccgatagtatgtgcttactaatgacgtcatcgcgctcgtggcgctcccggagcggatttaagttcatgcgaaggaattcggaggaggtggtgcgggacatggccacgtacgcgctgttgaggcgcaggttgccgggcgtaaagcagatggcgaccttgtccaggctaaggccctgggagcgcgtgatggtcatggcaagcttggagctgatgccgtagtcggcgtttatggccatggccagctccgtagagtcaatggactcgacaaactcgctgatgttggtgttgacgacggacatgaagccgtgttggtcccgcaagaccacgtaaggcaggggggcctcttccagtaactcggccacgttggccgtcgcgtgccgcctccgcagctcgtccgcaaaggcaaacacccgtgcgtacgtgtatcccatgagcgtataattgtccgtctgcagggcgacggacatcagccccccgcgcggcgagccggtcagcatctcgcagccccggaagataacgttgtccacgtacgtgctaaagggggcgccttcaaatgcctccccaaagagctcttggaggattcggaatctcccgaggaaggcccgcttcagcagcgcaaactgggtgtgaacggcggcggtggtctccggttccccgggggtgtagtggcagtaaaacacgtcgagctgttgttcgtccagccccgcgaaaataacgtcgaggtcgtcgtcgggaaaatcgtccgggcccccgtcccgcggccccagttgcttaaaatcaaacgcacgctcgccgggggcgcctgcgtcggccattaccgacgcctgcgtcggcacccccgaagatttggggcgcagagacagaatctccgccgttagttctcccatgcgggcgtaggcgagggtcctctgggtcgcatccaggcccgggcgctgcagaaagttgtaaaaggagataagcccgctaaatatgagccgcgacaggaacctgtaggcaaactccaccgaagtctccccctgagtctttacaaagctgtcgtcacgcaacactgcctcgaaggcccggaacgtcccactaaacccaaaaaccagttttcgcaggcgcgcggttaccgcgatctggctgttgaggacgtaagtgacgtcgttgcgggccacgaccagctgctgtttgctgtgcacctcgcagcgcatgtgccccgcgtcctggtcctggctctgcgagtagttggtgatgcggctggcgttggccgtgagccacttttcaatagtcaggccgggctggtgtgtcagccgtcggtattcgtcaaactccttgaccgacacgaacgtaagcacggggagggtgaacacgacaaactccccctcacgggtcaccttcaggtaggcgtggagcttggccatgtacgcgctcacctctttgtgggaggagaacaaccgcgtccagccggggaggttggcggggttggtgatgtagttttccgggacgacgaagcgatccacgaactgcatgtgctcctcggtgatgggtaggccgtactccagcaccttcatgaggttaccgaactcgtgctcgatgcaccgtttgttgttaataaaaatggcccagctatacgagaggcgggcgtactcccgcagcgtgcggttgcagatgaggtacgtgagcacgttctcgctctggcggacggaacaccgcagtttctggtgctcgaaggtcgactccagggacgccgtctgtgtcggcgagcccacacacaccaacacgggccgcaggcgggccgcgtactggggggtgtggtacagggcgttaatcatccaccagcaatacaccacggccgtgaggaggtgacgcccaaggagcccggcctcgtcgatgacgatcacgttgctgcgggtaaaggccggcagcgccccgtgggtggccggggccaaccgcgtcagggcgccctcggccaaccccagggtccgttccagggcggccagggcgcgaaactcgttccgcgactcctcgcccccggaggcggccagggtgcgcttcgtgaggtccaaaatcacctcccagtagtacgtcagatctcgtcgctgcaggtcctccagcgaggcggggttgctggtcagggtgtacgggtactgccccagttgggcctggacgtgattcccgcgaaacccaaattcatgaaagatggtgttgatgggtcggctgagaaaggcgcccgagagtttggcgtacatgttttgggccgcaatgcgcgtggcgcccgtcaccacacagtccaagacctcgttgattgtctgcacgcacgtgctctttccggagccagcgttgccggtgataagatacaccgcgaacggaaactccctgaggggcaggcctgcgggggactctaaggccgccacgtcccggaaccactgcagacggggcacttgcgctccgtcgagctgttgttgcgagagctctcggatgcgcttaaggattggctgcaccccgtgcatagacgtaaaatttaaaaaggcctcggccctccctggaacggctggtcggtccccgggttgctgaaggtgcggcgggccgggtctctgtccgtctagctggcgctccccgccggccgccgccatgaccgcaccacgctcgcgggcccccactacgcgtgcgcggggggacacggaagcgctgtgctcccccgaggacggctgggtaaaggttcaccccacccccggtacgatgctgttccgcgagattctccacgggcagctggggtataccgagggccagggggtgtacaacgtcgtccggtccagcgaggcgaccacccggcagctgcaggcggcgatctttcacgcgctcctcaacgccaccacttaccgggacctcgaggcggactggctcggccacgtggcggcccgcggtctgcagccccaacggctggttcgccggtacaggaacgcccgggaggcggatatcgccggggtggccgagcgggtgttcgacacgtggcggaacacgcttaggacgacgctgctggactttgcccacgggttggtcgcctgctttgcgccgggcggcccgagcggcccgtcaagcttccccaaatatatcgactggctgacgtgcctggggttggtccccatattacgcaagcgacaagaagggggtgtgacgcagggtctgagggcgtttctcaagcagcacccgctgacccgccagctggccacggtcgcggaggccgcggagcgcgccggccccgggttttttgagctggcgctggccttcgactccacgcgcgtggcggactacgaccgcgtgtatatttactacaaccaccgccggggcgactggctcgtgcgagaccccatcagcgggcagcgcggagaatgtctggtgctgtggcctcccttgtggaccggggaccgtctggtcttcgattcgcccgtacagcggctgtttcccgagatcgtcgcgtgtcactccctccgggaacacgcgcacgtctgccggctgcgcaataccgcgtccgtcaaggtgctgctggggcgcaagagcgacagcgagcgcggggtggccggcgccgcgcgggtcgttaacaaggtgttgggggaggacgacgagaccaaggccgggtcggccgcctcgcgcctcgtgcggcttatcatcaacatgaagggcatgcgccacgtaggcgacattaacgacactgtgcgtgcctacctcgacgaggccggggggcacctgatagacgccccggccgtcgacggtaccctcccgggattcggcaagggcggaaacagccgcgggtctgcgggccaggaccagggggggcgggcgccgcagcttcgccaggccttccgcacggccgtggttaacaacatcaacggcgtgttggagggctatataaataacctgtttggaaccatcgagcgcctgcgcgagaccaacgcgggcctggcgacccagttgcaggagcgcgaccgcgagctccggcgcgcaacatcgggggccctggagcgccagcagcgcgcggccgacctggcggccgagtccgtgaccgggggatgcggcagccgccctgcgggggcggacctgctccgggccgactatgacattatcgacgtcagcaagtccatggacgacgacacgtacgtcgccaacagttttcagcacccgtacatcccttcgtacgcccaggacctggagcgcctgtcgcgcctctgggagcacgagctggtgcgctgtttcaaaattctgtgtcaccgcaacaaccagggccaagagacgtcgatctcgtactccagcggggcgatcgccgcattcgtcgccccctactttgagtcagtgcttcgggccccccgggtaggcgcgcccatcacgggctccgatgtcatcctgggggaggaggagttatgggatgcggtgtttaagaaaacccgcctgcaaacgtacctgacagacatcgcggccctgttcgtcgcggacgtccagcacgcagcgctgcccccgcccccctccccggtcggcgccgatttccggcccggcgcgtccccgcggggccggtccagatcgcggtcgcccggaagaactgcgcgaggcgcgccggaccagggcgggggcatcgggcaccgggatggccgccgcgacggccgacgatgaggggtcggccgccaccatcctcaagcaggccatcgccggggaccgcagcctggtcgaggcggccgaggcgattagccagcagacgctgctccgcctggcctgcgaggtgcgccaggtcggcgaccgccagccgcggtttaccgccaccagcatcgcgcgcgtcgacgtcgcgcctgggtgccggttgcggttcgttctggacgggagtcccgaggacgcctatgtgacgtcggaggattactttaagcgctgctgcggccagtccagttatcgcggcttcgcggtggcggtcctgacggccaacgaggaccacgtgcacagcctggccgtgccccccctcgttctgctgcaccggttctccctgttcaaccccagggacctcctggactttgagcttgcctgtctgctgatgtacctggagaactgcccccgaagccacgccaccccgtcgacctttgccaaggttctggcgtggctcggggtcgcgggtcgccgcacgtccccattcgaacgcgttcgctgccttttcctccgcagttgccactgggtcctaaacacactcatgttcatggtgcacgtaaaaccgttcgacgacgagttcgtcctgccccactggtacatggcccggtacctgctggccaacaacccgccccccgttctctcggccctgttctgtgccaccccgacaagctcctcattccggctgccggggccgcccccccgctccgactgcgtggcctataaccccgccgggatcatggggagctgctgggcgtcggaggaggtgcgcgcgcctctggtctattggtggctttcggagaccccaaaacgacagacgtcgtcgctgttttatcagttttgttgaattttaggaaataaacccggttttgtttctgtggcctcccgacggatgcgcgtgtccttactccgtcttggtgggtgggtggctgtgtatggcgtcccatctgtgcggggaggggggcaagtcggcacgtattcggacagactcaagcacacacgggggagcgctcttgtctcagggcaatgtttttattggtcaaactcaggcaaacagaaacgacatcttgtcgtcaaagggatacacaaacttccccccctcgccccatactcccgccagcaccccggtaaacaccaactcaatctcgcgcaggatttcgcgcaggtgatgagcgcagtccacgggggggagcacaaggggccgcgggtatagatcgacggggacgccgaccgactccccgcctccgggacagacacgcacgacgcgccgccagtagtgctctgcgtccagcaaggcgccgccgcggaaggcagtggggggcaaggggtcgctggcctcaaagggggacacccgaacgctccagtactccgcgtccaaccgtttattaaacgcgtccaagataaggcggtcgcaggcgtcctccataaggccccgggccgtgagtgcgtcctcctccggcacgcctgccgttgtcaggcccaggacccgtcgcagcgtgtcgcgtacgaccccggccgccgtggtgtacgcgggcccgcggagaggaaatcccccaagatggtcagtgttgtcgcgggagttccagaaccacactcccgcctggctccaggcgactgcgtgggtgtagacgccctcgagggccaggcacagtgggtgccgcagccggaggccgttggccctaagcacggctcccacggccgtctcgatggcccgccgggcgtcctcgatcaccccggaagccgcatccgcgtcttgggggtccacgttaaagacaccccagaacgcacccccatcgcccccgcagaccgcgaacttcaccgagctggccgtctcctcgatctgcaggcagacggcggccattaccccacccaggagctgccgcagcgcagggcaggcgttgcacgtgtccgggaccaggcgctccaagacggccccggcccagggctctgagggagcggccaccaccagcgcgtccagtcttgctaggcccgtccggccgtgggggtccgccagcccgctccccccgaggtcggccagggccgccaggagctgggcgcgaagtccggggaagcaaaaccgcgccgtccagacgggcccgacggccgcgggcgggtctaacagttggatgattttagtggcgggatgccaccgcgccaccgcctcccgcactgcgggcaggaggcatccggctgccgccgaggccacgccgggccaggctcgcggggggaggacgaccctgacccccaccgcgggccaggcccccaggagcgcggcgtaagcggccgcggccccgcgcaccaggtcccgtgccgactcggccgtggccggcacggtgaacgtgggccaacccggaaaccccaggacggcaaagtacgggacgggtcccccccggacctcaaactcgggccccagaaaggcaaagacgggggccagggccccgggggcggcgtggaccgtggtatgccactgccggaaaagggcgacgagcgccggcgcggagaacttctcgccggcgcttacaaagtagtcgtaatcgcggggcagcagcacccgtgccgtgactcgttgcgggtgcccgcgtggccgcaggcccacctcgcacacctcgaccaggtccccgaacgcgccctccttcttgatcggcggaaacgcaagagtctggtattcgcgcgcaaatagcgcggttccggtggtgatgttaacggtcagcgaagcggtggacgcgcactggggggtgtcgcgaatggccgccaggcgcgcccacgccagccgcgcgtcgggatgctcggcaacgcgcgccgccagggccatagggtcgatgtcaatgttggcctccgcgaccaggagagcggcgcgaggggcggcgggcgggccccacgacgctctctcaactttcaccaccagtcccgtgcgtgggtccgagccgatacgcagcggggcgaacagggccaccggcccggtctggcgctccagggccgccaggacgcacgcgtacagcgcccgccacagagtcgggttctccaggggctccagcggggaggcggccggcgtcgtcgcggcgcgggcggccgccacgacggcctggacggagacgtccgcggagccgtagaaatcccgcagctccgtcgcggtgacggagacctccgcaaagcgcgcgcgaccctcccctgcggcgttgcgacatacaaaatacaccagggcgtggaagtactcgcgagcgcgggggggcagccataccgcgtaaagggtaatggcgctgacgctctcctccacccacacgatatctgcggtgtccatcgcacggcccctaaggatcacgggcggtctgtgggtcccatgctgccgtgcctggccgggcccggtgggttgcggaaaccggtgacgggggggggggcggtttttggggttggggtgggaaacggcccgggtccgggggccaacttggcccctcggtgcgttccggcaacagcgccgccggtccgcggacgaccacgtaccgaacgagtgcggtcccgagacttatagggtgctaaagttcaccgccccctgcatcatgggccaggcctcggtggggagctccgacagcgccgcctccaggatgatgtcagcgttggggttggcgctggatgagtgcgtgcgcaaacagcgcccccacgcgggcacgcgtagcttgaagcgcgcgcccgcaaactcccgcttgtgggccataagcagggcgtacagctgcctgtgggtccggcaggcgctgtggtcgatgtggtgggcgtccaacaaccccacgattgtctgtttggtgaggtttttaacgcgccccgccccgggaaacgtctgcgtgcttttggccatctgcacgccaaacagttcgccccagattatcttgaacagcgccaccgcgtggtccgtctcactaacggacccgcgcgggggacagccgcttagggcgtcggcgacgcgcttgacggcttcctccgagagcagaagtccgtcggttacgttacagtggcccagttcgaacaccagctgcatgtagcggtcgtagtggggggtcagcaggtccagcacgtcatcggggccgaaggtcctcccagatcccccggccgccgagtcccaatgcaggcgcgcggccatggtgctgcacaggcacaacagctcccagacaggggttacgttcagggtggggggcagggccacgagctccagctctccggtgacgttgatcgtggggatgacgcccgtggcgtagtggtcatagatccgccgaaatatggcgctgctgcgggtggccatgggaacgcggagacaggcctccagcaacgccaggtaaataaaccgcgtgcgtcccatcaggctgttgaggttgcgcatgagcgcgacaatttccgccggcgcgacatcggaccggaggtatttttcgacgaaaagacccacctcctccgtctcggcggcctgggccggcagcgacgcctcgggatcccggcaccgcagctcccgtagatcgcgctgggccctgagggcgtcgaaatgtacgccccgcaaaaacagacagaagtcctttggggtcagggtatcgtcgtgtccccagaagcgcacgcgtatgcagtttagggtcagcagcatgtgaaggatgttaaggctgtccgagagacacgccagcgtgcatctctcaaagtagtgtttgtaacggaatttgttgtagatgcgcgacccccgccccagcgacgtgtcgcatgccgacgcgtcacagcgccccttgaaccggcgacacagcaggtttgtgacctgggagaactgcgcgggccactggccgcaggaactgaccacgtggttcaggagcatgggcgtaaagacgggctccgagcgcgccccggagccgtccatgtaaatcagtagctcccccttgcggagggtgcgcacccgtcccagggactggtacacggacaccatgtccggtccgtagttcatgggtttcacgtaggcgaacatgccatcaaagtgcaggggatcgaagctgaggcccacggttacgaccgtcgtgtatataaccacgcggtattggccccacgtggtcacgtccccgaggggggtgagcgagtgaagcaacagcacgcggtccgtaaactgacggcagaaccgggccacgatctccgcgaaggagaccgtcgacgaaaaaatgcagatgttatcgcccccgccaaggcgcgcttccagctccccaaagaacgtggccccccgggcgtccggagaggcgtccggagacgggccgctcggcggcccgggcgggcgcagggcagcctgcaggagctcggtccccagacgcgggagaaacaggcaccggcgcgccgaaaacccgggcatggcgtactcgccgaccaccacatgcacgtttttttcgccccggagaccgcacaggaagtccaccaactgcgcgttggcggttgcgtccatggcgatgatccgaggacatgtgcgcagcaggcgtagcattaacgcatccacgcggcccagttgctgcatcgttggcgaatagagctggcccagcgtcgacataacctcgtccagaacgaggacgtcgtagttgttcagaaggttggggcccacgcgatgaaggctttccacctggacgataagtcggtggaaggggcggtcgttcataatgtaattggtggatgagaagtaggtgacaaagtcgaccaggcctgactcagcgaaccgcgtcgccagggtctgggtaaaactccgacgacaggagacgacgagcacactcgtgtccggagagtggatcgcttcccgcagccagcggatcagcgcggtagtttttcccgaccccattggcgcgcggaccacagtcacgcacctggccgtcggggcgctcgcgttggggaaggtgacgggtccgtgctgctgccgctcgatcgttgttttcgggtgaacccggggcacccattcggccaaatcccccccgtataacatccgcgctagcgatacgctcgacgtgtactgttcgcactcgtcgtccccaatgggacgcccggcccccagaggatcccccgactccgcgccccccacgaaaggcatgaccggggcgcggacggcgtggtgggtctggtgtgtgcaggtggcgacgtttgtggtctctgcggtctgcgtcacggggctcctcgtcctggcctctgtgttccgggcacggtttccctgcttttacgccacggcgagctcttatgccggggttaactccacggccgaggtgcgcgggggtgtagccgtgcccctcaggttggacacgcagagccttgtgggcacttatgtaatcacggccgtattgttgttggccgcggccgtgtatgccgtggtcggcgccgtgacctcccgctacgaccgcgccctggacgcgggccgccgtctggctgcggcccgcatggccatgccgcacgccacgctgatcgccggaaacgtctgctcttggttgctgcagatcaccgtcctgctgctggcccatcgcatcagccagctggcccacctggtttacgtcctgcactttgcgtgtctggtgtattttgcggcccatttttgcaccaggggggtcctgagcgggacgtatctgcgtcaggtgcacggcctgatggagctggccccgacccatcatcgcgtcgtcggcccggctcgcgccgtgctgacaaacgccttgctgttgggcgtcttcctgtgcacggccgacgccgcggtatccctgaataccatcgccgcgttcaactttaatttttcggccccgggcatgctcatctgcctgaccgtgctgttcgccattctcgtcgtatcgctgttgttggtggtcgagggggtgttgtgtcactacgtgcgcgtgttggtgggcccccacctgggggccgttgccgccacgggcatcgtcggcctggcctgcgagcactattacaccaacggctactacgtggtggagacgcagtggccgggggcacagacgggagtgcgcgtcgccctcgccctggtcgccgcctttgccctcggcatggccgtgctccgctgcacccgcgcctatctgtatcacaggcggcaccacaccaaattttttatgcgcatgcgcgacacgcgacaccgcgcacattccgccctcaagcgcgtacgcagttccatgcgcggatcgcgagacggccgccacaggcccgcgcccggcagcccgcccgggattcccgaatatgcggaagacccctacgcgatctcatacggcggccagctcgaccggtacggagattccgacggggagccgatttacgacgaggtggcggacgaccaaaccgacgtattgtacgccaagatacaacacccgcggcacctgcccgacgacgagcccatctatgacaccgttggggggtacgaccccgagcccgccgaggaccccgtgtacagcaccgtccgccgttggtagctgtttggttccgttttaataaaccgtttgtgtttaacccgaccgtggtgtatgtctggtgtgtggcgtccgatcccgttactatcaccgtccccccccctcaaccccggcgattgtgggttttttaaaaacgacacgcgtgcgaccgtatacagaacattattttggtttttattcgctatcggacatggggggtggaaactgggtggcggggcaggcgcctccgggggtccgccggtgagtgtggcgcgagggggggtccgacgaacgcaggcgcggtctccccggggcccgcgtaaccacgcgcatatccgggggcacgtagaaattaccttcctcttcggactcgatatccacgacgtcaaagtcgtgggcggtcagcgagacgacctccccgtcgtcggtgatgaggacgttgtttcggcagcagcagggccgggccccggagaacgagaggcccatagctcggcgagcgtgtcgtcgaacgccaggcggctgcttcgctggatggccttatagatctccggatcgatgcggacgggggtaatgatcagggcgatcggaacggcctggttcgggagaatggacgccttgctgggtcctgcggccccgagagccccggcgccgtcctccaggcggaacgttacgccctcctccgcgctggtgcggtgcctgccgataaacgtcaccagatgcgggtggggggggcagtcggggaagtggctgtcgagcacgtagccctgcaccaagatctgcttaaagttcgggtggcgggggttcgcgaagacgggctcgcggcggaccagatccccggagctccaggacacgggggagatggtgtggcgtccgaggtcgggggcgccaaacagaagcacctccgagacaacgccgctatttaactccaccaaggcccgatccgcggcggagcaccgccttttttcgcccgaggcgtgggcctctgaccaggcctggtcttgcgtgacgagagcctcctccgggccggggacgcgcccgggcgcgaagtatcgcacgctgggcttcgggatcgaccggataaatgcccggaacgcctccggggaccggtgtgccatcaagtcctcgtacgcggaggccgtggggtcgctggggtccatggggtcgaaagcgtacttggcccggcatttgacctcgtaaaaggccaggggggtcttggggactggggccaggtagccgtgaatgtcccgaggacagacgagaatatccagggacgccccgaccatccccgtgtgaccgtccatgaggaccccacacgtatgcacgttctcttcggcgaggtcgctgggttcgtggaagataaagcgccgcgtgtcggcgccggcctcgccgccgtcgtccgcgcggcccacgcagtagcgaaacagcaggcttcgggccgtcggctcgttcacccgcccgaacatcaccgccgaagactgtacatccggtcgcaggctggcgttgtgcttcagccactggggcgagaaacacggaccctgggggccccagcggagggtggatgcggtcgtgaggccccgccggagcagggcccatagctggcagtcggcctggttttgcgtggccgcctcgtaaaaccccatgaggggccggggcgccacggcgtccgcggcggccgggggggcgcggcgcgtcaggcgccataggtgccggccgagtccgcggtccaccatacccgcctcctcgaggaccacggccagggaacacagataatccaggcgggcccagaggggaccgatggccagaggggcgcggacgccgcgcagcaacccgcgcaggtggcgctcgaacgtctcggctagtatatgggagggcagcgcgttggggatcaccgacgccgaccacatagagtcaaggtccggggagtcgggatcggcgtccgggtcgcgggcgtgggtgcccccaggagatagcggaatgtccggggtcggaggcccggaggcgtcagaaagtgccggcgacgcggcccggggcttttcgtctgcggtgtcggtggcgtgctgatcacgtggggggttatcgggcgaatgggagctcgggtccacagctgacgtcgtctggggtggggggggcaggggacggaaggtggttgtcagcggaagactgttagggcgggggcgcttgggggggctgtcggggccacgaggggtgtcctcggccagggcccagggacgcttagtcacggtgcgtcccggcggacatgctgggcctaccgtggactccatttccgagacgacgtggggggagcggtggttgagcgcgccgccgggtgaacgctgattctcacgacagcgcgtgccgcgcgcacgggttggtgtgacacaggcgggacaccagcaccaggagaggcttaagctcgggaggcagcgccaccgacgacagtatcgccttgtgtgtgtgctggtaatttatacaccgatccgtaaacgcgcgccgaatcttgggattgcggaggtggcgccggatgccctctgggacgtcatacgccaggccgtgggtgttggtctcggccgagttgacaaacagggctgggtgcagcacgcagcgataggcgagcagggccagggcgaagtccggcgacagctggttgttgaaatactggtaaccgggaaaccgggtcacgggtacgcccaggctcggggcgacgtacacgctaaccaccaactccagcagcgtctggcccagggcgtacaggtcaaccgctagcccgacgtcgtgcttcaggcggtggttggtaaattcggcccgttcgttgttaaggtatttcaccaacagctccgggggctggttatacccgtgacccaccagggtgtgaaagttggctgtggttagggcggtgggcatgccaaacatccggggggacttgaggtccggctcctggaggcaaaactgcccccgggcgatcgtggagttggagttgagggtgacgaggctaaagtcggcgaggacggcccgccggagcgagacggcgtccgaccgcagcatgacgaggatgttggcgcacttgatatccaggtggctgatcccgcaggtggtgtttaaaaacacaacggcacgggccagctccgtgaagcactggtggagggccgtcgagaccgaggggtttgttgtgcgcagggacgccagttggccgatatacttaccgaggtccatgtcgtacgcggggaacactatctgtcgttgttgcagcgagaacccgaggggcgcgatgaagccgcggatgttgtgggtgcggccggcgcgtagagcgcactccccgaccaacagggtcgcgatgagctcaacggcaaaccactccttttcctttatggtcttaacggcaagcttatgttcgcgaatcagttggacttcgccgtatcccccagaccccccgaagcttcgggccccggggatctcgagggtcgtgtagtgtagggcggggttgatggcgaacacggggctgcatagcttgcggatgcgcgtgagggtgaggatgtgcgagggggacgaggggggtgcggttaacgccgcctgggatctgcgcaggggcgggcggttcagtttggccgccgtaccgggcgcctcgggggacgcgcggcgatgagacgagcggctcattcgccatcgggatagtcccgcgcgaagccgctcgcggaggccggatcggtggcggcacccgtgggaggagcgggagacggcggcgttctggagagaggggccgctggggcgcccggaggccccatgggggttggagtgtatgtaggatgcgagccaatccttgaaggaccgttggcgtgcaccttgggggctgaggttagctgccacatgaccagcaggtcgctgtctgcgggactcatccatccttcggccaggtcgccgtctccccacagagaagcgttggtcgctgcctcctcgagttgctcctcctggtccgcaagacgatcgtccacggcgtccaggcgctcaccaagcgccggatcgaggtaccgtcggtgtgcggttagaaagtcacgacgcgccgcttgctcctccacgcgaattttaacacaggtcgcgcgctgtcgcatcatctctaagcgcgcgcgggactttagccgcgcctccaattccaagtgggccgcctttgcagccataaaggcgccaacaaaccgaggatcttgggtgctgacgccctcccggtgcagctgcagggtctggtccttgtaaatctcggctcggaggtgcgtctcggccaggcgtcggcgcagggccgcgtgggcggcatctcggtccattccgccaccctgcgggcgacccgggggtgctctgatagtctcgcgtgcccaaggcccgtgatcggggtacttcgccgccgcgacccgccacccggtgtgcgcgatgtttggtcagcagctggcgtccgacgtccagcagtacctggagcgcctcgagaaacagaggcaacttaaggtgggcgcggacgaggcgtcggcgggcctcacaatgggcggcgatgccctacgagtgccctttttagatttcgcgaccgcgacccccaagcgccaccagaccgtggtcccgggcgtcgggacgctccacgactgctgcgagcactcgccgctcttctcggccgtggcgcggcggctgctgtttaatagcctggtgccggcgcaactaaaggggcgtgatttcgggggcgaccacacggccaagctggaattcctggcccccgagttggtacgggcggtggcgcgactgcggtttaaggagtgcgcgccggcggacgtggtgcctcagcgtaacgcctactatagcgttctgaacacgtttcaggccctccaccgctccgaagcctttcgccagctggtgcactttgtgcgggactttgcccagctgcttaaaacctccttccgggcctccagcctcacggagaccacgggcccccccaaaaaacgggccaaggtggacgtggccacccacggccggacgtacggcacgctggagctgttccaaaaaatgatccttatgcacgccacctactttctggccgccgtgctcctcggggaccacgcggagcaggtcaacacgttcctgcgtctcgtgtttgagatccccctgtttagcgacgcggccgtgcgccacttccgccagcgcgccaccgtgtttctcgtcccccggcgccacggcaagacctggtttctggtgcccctcatcgcgctgtcgctggcctcctttcgggggatcaagatcggctacacggcgcacatccgcaaggcgaccgagccggtgtttgaggagatcgacgcctgcctgcggggctggttcggttcggcccgagtggaccacgttaaaggggaaaccatctccttctcgtttccggacgggtcgcgcagtaccatcgtgtttgcctccagccacaacacaaacgtaagtcctcttttctttcgcatggctctcccaaggggccccgggtcgacccgacccacacccacccacccacatacacacacaaccagacgcgggaggaaagtctgccccgtgggcactgatttttattcgggatcgcttgaggaggcccgggcaacggcccgggcaacggtggggcaactcgtagcaaataggcgactgatgtacgaagagaagacacacaggcgccacccggcgctggtcggggggatgttgtccgcgccgcaccgtcccccgacgacctcttgcagacggtccgtgatgcaaggacggcggggggcctgcagcagggtgaccgtatccacgggatggccaaagagaagcggacacaggctagcatccccctggaccgccagggtacactgggccatcttggcccacagacacggggcgacgcagggacaggactccgttacgacggaggagagccacagtgcgttggcggaatcgatgtggggcggcggggcgcaggactcgcagccccccgggtggttagtgatcctggccaggagccatcccagatggcgggccctgcttcccggtggacagagcgaccccaggtcgctgtccatggcccagcagtagatctggccgctggggaggtgccaccaggcccccgggcccaaggcgcagcacgcgcccggctccgggggggtcttcgcggggaccagatacgcgccatccagctcgccgaccactggctcctccgcgagctgttcggtggttgggtcgggggtttcctccgggggggtggccgcccgtatgcgggcgaacgtgagggtgcacaggagcggggtcagggggtgcgtcacgctccggaggtggacgatcgcgcagtagcggcgctcgcggttaaagaaaaagagggcaaagaaggtgttcgggggcaaccgcagcgccttggggcgcgtcagatacagaaaaatctcgcagaagagggcgcgcccggggtctgggttaggaagggccacctgacacagaggctcggtgaggaccgttagacaccgaaagatcttgagccgctcgtccgcccgaacgacgcgccacacaaagacggagttgacaatgcgcgcgatagagtcgacgtccgtccccaggtcgtcgactctgtcgcgcgtgccgcgagctccggcccgggaatccggccggggcaaggtccccgggggaccaggcggcgccaggggccgccggggtcccagctgcgccatgccgggggcggggggagggcaaaccccagaggcgggggccaacggcgcggggaggagtggatgggcgaggtggccgggggaaggcgcccgctagcgagaacggccgttcccggacgacaccttgcgacaaaacctaaggacagcggcccgcgcgacggggtccgagaggctaaggtaggccgcgatgttaatggtgaacgcaaagccgccgggaaagacaactatgccacagaggcggcgattaaaccccaggcagaggtaggcgtagctttccccgggcaggtattgctcgcagaccctgcgtggggctgtggaggggacggcctccatgaagcgacatttactctgctcgcgtttactgacgtcaccatccatcgccacggcgattggacgattgttaagccgcagcgtgtctccgcttgtgctgtagtagtcaaaaacgtaatggccgtcggagtcggcaaagcgggccgggaggtcgtcgccgagcgggacgacccgccgcccccgaccgccccgtccccccaggtgtgccaggacggccagggcatacgcggtgtgaaaaaaggcgtcgggggcggtcccctcgacggcgcgcatcaggttctcgaggagaatggggaagcgcctggtcacctcccccagccacgcgcgttggtcggggccaaagtcatagcgcaggcgctgtgagattcgcgggccgccctgaagcgcggcccggatggcctggcccagggcccggaggcacgccagatgtatgcgcgcggtaaaggcgacctcggcggcgatgtcaaagggcggcaggacggggcgcgggtggcgcaggggcacctcgagcgcgggaaagcggagcagcagctccgcctgcccagcgggagacagctggtgggggcgcacgacgcgttctgcggcgcaggcctcggtcagggccgtggccagcgccgaggacagcagcggagggcgggcgcgtcgcccgccccacgccactgagttctcgtaggagacgacgacgaagcgctgcttggttccgtagtggtggcgcaggaccacggagatagaacgacggctccacagccagtccggccggtcgccgccggccagggcttcccatccgcgatccaaccactcgaccagcgaccgcggctttgtggtaccaggggtaagggttagaacgtcgttcaggatgtcctcgcccccgggcccgtggggcgctggggccacaaagcggcccccgccggggggctccagacccgccagcaccgcatctgcgtcagccgcccccatggcgcccccgctgacggcctggtgaaccagggcgccctggcggagccccgatgcaacgccacaggccgcacgcccggtccgagcgcggaccgggtggcggcgggtgacgtcctgcactgcccgctgaaccaacgcgaggatctcctcgttctcctgtgcgatggacacgtcctgggccgcggtcgtgtcgccgccgggggccgtcagctgctcctccggggagatgggggggtcggacgccccgacgatgggcgggtctgcgggcgcccccgcgtggggccgggccaagggctgcggacgcggggacgcgctttcccccagacccatggacaggtgggccgcggcctccttcgcggccggcggggcggcggcgccaagcagagcgacgtagcggcacaaatgccgacagacgcgcatgatgcgcgtgctgtcggccgcgtagcgcgtgttgggggggacgagctcgtcgtaactaaacagaatcacgcgggcacagctcgcccccgagccccacgcgaggcgcagcgccgccacggcgtacgggtcatagacgccctgcgcgtcacacaccacgggcagggagacgaacaaccccccggcgctggacgcacgcggaaggaggccagggtgtgccggcacgacgggggccagaagctcccccaccgcatccgcgggcacgtaggcggcaaacgccgtgcaccacggggtacagtcgccggtggcatgagcccgagtctggatttcgacctggaagtttgcggccgtcccgagtccggggcggccgcgcatcagggcggccagagggattcccgcggccgccaggcactcgctggatatgatgacgtgaaccaaagacgagggccgacccgggccgtggccgagatcgtactggacctcgttggccaagtgcgcgttcatggttcggggtgggtgtgggtgtgtaggcgatgcgggtcccccgagtccgcgggaagggcgtgggtttggcgcgcgtatgcgtattcgccaacggaggcgtgcgtgcttatgcgcggcgcgtttcttctgtctccagggaatccgaggccaggactttaacctgctctttgtcgacgaggccaactttattcgcccggatgcggtccagacgattatgggctttctcaaccaggccaactgcaagattatcttcgtgtcgtccaccaacaccgggaaggccagtacgagctttttgtacaacctccgcggggccgccgacgagcttctcaacgtggtgacctatatatgcgatgatcacatgccgagggtggtgacgcacacaaacgccacggcctgttcttgttatatcctcaacaagcccgttttcatcacgatggacggggcggttcgccggaccgccgatttgtttctggccgattccttcatgcaggagatcatcgggggccaggccagggagaccggcgacgaccggcccgttctgaccaagtctgcgggggagcggtttctgttgtaccgcccctcgaccaccaccaacagcggcctcatggcccccgatttgtacgtgtacgtggatcccgcgttcacggccaacacccgagcctccgggaccggcgtcgctgtcgtcgggcggtaccgcgacgattatatcatctttgccctggagcacttttttctccgcgcgctcacgggctcggcccccgccgacatcgcccgctgcgtcgtccacagtctgacgcaggtcctggccttgcatcccggggcgtttcgcggcgtccgggtggcggtcgagggaaatagcagccaggactcggccgtcgccatcgccacgcacgtgcacacagagatgcaccgcctactggcctcggagggggccgacgcgggctcgggccccgagcttctcttctaccactgcgagcctcccgggagcgcggtgctgtacccctttttcctgctcaacaaacagaagacgcccgcctttgaacactttattaaaaagtttaactccgggggcgtcatggcctcccaggagatcgtttccgcgacggtgcgcctgcagaccgacccggtcgagtatctgctcgagcagctgaataacctcaccgaaaccgtctcccccaacactgacgtccgtacgtattccggaaaacggaacggcgcctcggatgaccttatggtcgccgtcattatggccatctaccttgcggcccaggccggacctccgcacacattcgctcccatcacacgcgtttcgtgagcgcccaataaacacacccaggtatgctacgcacgaccacggtgtcgcctgttaaggggggggaagggggtgttggcgggaagcgtgggaacacgggggattctctcacgaccggcaccagtaccacccccctgtgaacacagaaacccaacccaaatcccataaacatacgacacacaggcatattttggaatttcttgggtttttatttatttaggtatgctggggtttctccctggatgcccaccccccacccccccccgtgggtctagccgggccttagggatagcgtataacgggggccatgtctccggaccgcacaacggccgcgccgtcaaaggtgcacacccgaaccacgggagccagggccaaggtgtctcctagttggcccgcgtgggtcagccaggcgacgagcgcctcgtaaagcggcagccttcgctctccatcctgcaccagggccggggcttcggggtgaatgagctgggcggcctcccgcgtgacactctgcatctgcaggagagcgttcacgtacccgtcctgggcacttagcgcaaagagccgggggattagcgtaaggatgatggtggttccctccgtgatcgagtaaaccatgttaaggaccagcgatcgcagctcggcgtttacgggaccgagttgttggacgtccgccagcagcgagaggcgactcccgttgtagtacagcacgttgaggtctggcagccctccggggtttctggggctggggttcaggtcccggatgcccctggccacgagccgcgccacgatttcgcgcgccaggggcgatggaagcggaacgggaaaccgcaacgtgaggtccagcgaatccaggcgcacgtccgtcgcttggccctcgaacacgggcgggacgaggctgatggggtccccgttacagagatctacgggggaggtgttgcgaaggttaacggtgccggcgtgggtgaggcccacgtccaggggacaggcgacgattcgcgtgggaagcacccgggtgatgaccgcggggaagcgccttcggtacgccagcaacaaccccaacgtgtcgggactgacgcctccggagacgaaggattcgtgcgccacgtcggccagcgtcagttgccggcggatggtcggcaggaataccacccgcccttcgcagcgctgcagcgccgccgcatcggggcgcgagatgcccgagggtatcgcgatgtcagtttcaaagccgtccgccagcatggcgccgatccacgcggcagggagtgcagtggtggttcgggtggcgggaggagcgcggtgggggtcagcggcgtagcagagacgggcgaccaacctcgcataggacggggggtgggtcttagggggttgggaggcgacagggaccccagagcatgcgcggggaggtctgtcgggcccagacgcaccgagagcgaatccgtccacggagtcccggtctgggttttatggggcccggccctcggaatcgcggcttgtcggcggggacaaagggggcggggctagggggcttgcggaaacagaagacgcgtgggataaaagaatcgcactaccccaaggaagggcggggcggtttattacagagccagtcccttgagcggggatgcgtcatagacgagatactgcgcgaagtgggtctcccgcgcgtgggcttccccgttgcgggcgctgcggaggagggcggggtcgctggcgcaggtgagcgggtaggcctcctgaaacaggccacacgggtcctccacgagttcgcggcaccccggggggcgcttaaactgtacgtcgctggcggcggtggccgtggacaccgccgaacccgtctccacgatcaggcgctccaggcagcgatgtttggcggcgatgtcggccgacgtaaagaacttaaagcaggggctgagcaccggcgaggccccgttgaggtggtaggccccgttatagagcaggtccccgtacgaaaatcgctgcgacgcccacgggttggccgtggccgcaaaggcccgggacgggtcgctctggccgtggtcgtacatgagggcggtgacatccccctccttgtcccccgcgtaaacgcccccggcggcgcgtccccgggggttgcagggccggcggaagtagttgacgtcggtcgacacgggggtggcgataaactcacacacggcgtcctggccgtggtccatccctgcgcgccgcggcacctgggcgcacccgaacacggggacgggctgggccggccccaggcggtttcccgccacgaccgcgttccgcaggtacacggctgccgcgttgtccaggagagggggagccccgcggcccaggtaaaagttttggggaaggttgcccatgtcggtgacggggttgcggacggttgccgtggccacgacggcggtgtagcccacgcccaggtccacgttcccgcgcggctgggtgagcgtgaagtttacccccccgccagtttcgtgccgggccacctggagctggcccaggaagtacgcctccgacgcgcgctccgagaacagcatgttctcagtcacaaagcggtcctgtcggacgacggtgaacccaaacccgggatggaggcccgtcttgagctgatgatgcaaggccacgggactgatcttgaagtaccccgccatgagcgcgtaggtcagcgcgttctccccggccgcgctctcgcggacgtgctgcacgacgggctgtcggatcgacgaaaagtagttggcccccagagccggggggaccagggggacctgccgcgacaggtcgcgcagggccggggggaaattgggcgcgttcgccacgtggtcggccccggcgaacagcgcgttgacgggaagggggtaaaaatagtcgccattttggatggtatggtccagatgctggggggccatcagcaggattccggcgtgcaacgccccgtcgaatatgcgcatgttggtggtggacgcggtgttggcgcccgcgtcgggcgccgccgagcagagcagcgccgttgtgcgttcggccatgttgtgggccagcacctgcagcgtgagcatggcgggcccgtccactaccacgcgcccgttgtgaaacatggcgttgaccgtgttggccaccagattggccgggtgcagggggtgcgcggggtccgtcacggggtcgctggggcactcctcgccgggggcgatctccgggaccaccatgttctgcagggtggcgtatacgcggtcgaagcgaacccccgcggtgcagcagcggccccgcgagaaggcgggcaccatcacgtagtagtaaatcttgtggtgcacggtccagtccgccccccggtgcggccggtcatccgcggcgtccgcggctcgggcctgggtgttgtgcagcagctggccgtcgttgcggttgaagtccgcggtcgccacgttacatgccgccgcgtacacggggtcgtggccccccgcgctaacccggcagtcgcgatggcggtccagggccgcgcgccgcatcagggcgtcacagtcccacacgaggggtggcagcagcgccgggtctcgcattaggtgattcagctcggcttgcgcctgcccgcccagctccgggccggtcagggtaaagtcatcaaccagctgggccagggcctcgacgtgcgccaccaggtcccggtacacggccatgcactcctcgggaaggtctcccccgaggtaggtcacgacgtacgagaccagcgagtagtcgttcacgaacgccgcgcaccgcgtgttgttccagtagctggtgatgcactggacaacgagccgggccagggcgcagaagacgtgctcgctgccgtgtatggcggcctgcagcaggtaaaacaccgccgggtagttgcggtcgtcgaacgccccgcgaacggcggcgatggtggcgggggccatggcgtggcgtcccacccccagctccaggccccgggcgtcccggaacgccgccggacatagcgccaggggcaagttgccgttcaccacgcgccaggtggcctggatctcccccgggccggccgggggaacgtccccccccggcagctccacgtcggccacccccacgaagaagtcgaacgcggggtgcagctcaagagccaggttggcgttgtcgggctgcataaactgctccggggtcatctggccttccgcgacccatcggacccgcccgtgggccaggcgctgcccccaggcgttcaaaaacagctgctgcatgtctgcggcggggccggccggggccgccacgtacgccccgtacggattggcggcttcgacggggtcgcggttaaggcccccgaccgccgcgtcaacgttcatcagcgaagggtggcacacggtcccgatcgcgtgttccagagacaggcgcagcacctggcggtccttcccccaaaaaaacagctggcggggcgggaaggcgcggggatccgggtggccgggggcggggactaggtccccggcgtgcgcggcaaaccgttccatgaccggattgaacaggcccaggggcaggacgaacgtcaggtccatggcgcccaccagggggtagggaacgttggtggcggcgtagatgcgcttctccagggcctccagaaagaccagcttctcgccgatggacaccagatccgcgcgcacgcgcgtcgtctggggggcgctctcgagctcgtccagcgtctgccggttcaggtcgagctgctcctcctgcatctccagcaggtggcggcccacgtcgtccagacttcgcacggccttgcccatcacgagcgccgtgaccaggttggccccgttcaggaccatctcgccgtacgtcaccggcacgtcggcttcggtgtcctccactttcaggaaggactgcaggaggcgctgtttgatcggggctgtggtgactagcaccccgtcgaccggccgcccgcgcgtgtcggcatgcgtcagacggggcacggccacggagggctgcgtggccgtggtgaggtccacgagccaggcctcgacggcctcccggcggtggcccgccttgcccaggaaaaagctcgtctcgcagaagcttcgctttagctcggcgaccagggtcgcccgggccaccctggtggccaggcggccgttgtccaggtatcgttgcatcggcaacaacaaagccaggggcggcgccttttccagcagcacgtgcagcatctggtcggccgtgccgcgctcaaacgccccgaggacggcctggacgttgcgagcgagctgttggatggcgcgcaactggcgatgcgcgctgatacccgtcccgtccagggcctcccccgtgagcagggcgatggcctcggtggccaggctgaaggcggcgttcagggcccggcggtcgataatcttggtcatgtaattgtgtgtgggttgctcgatggggtgcgggccgtcgcgggcaatcagcggctggtggacctcgaactgtacgcgcccctcgttcatgtaggccagctccggaaacttggtacacacgcacgccaccgacaacccgagctccagaaagcgcacgagcgacagggtgttgcaatacgaccccagcagggcgtcgaactcgacgtcgtacaggctgtttgcatcggagcgcacgcgggaaaaaaaatcgaacaggcgtcgatgcgacgccacctcgatcgtgctaaggagggacccggtcggcaccatggccgcggcataccggtatcccggagggtcgcggttgggagcggccatggggtcgcgtggagatcggctgtctctagcgatattggcccggggaggctaagatccaccccaacgcccggccacccgtgtacgtgcccgacggcccaaggtccaccgaaagacacgacggacccggacccaaagaggcgggggatgctgtgtgagaggccgggtgtcggtcgggggggaaaggcaccgggagaaggctgcggcctcgttccaggagaacccagtgtccccaacagacccggggacgtgggatccccggccttatatacccccccccgccccacccccgttagaacgcgacgggtgcattcaagatggccctggtccaaaagcgtgccaggaagaaattggcagaggcggcaaagctgtccgccgccgccacccacatcgaggccccggccgcacaggctatccccagggcccgtgtgcgcaggggatcggtgggtggcagcatttggttggtggcgataaagtggaaaagcccgtccggactgaaggtctcgtgggcggcggcgaacaaggcacacagggccgtgcctcccaaaaacacggacatcccccaaaacacgggcgccgacaacggcagacgatccctcttgatgttaacgtacaggaggagcgcccgcaccgcccacgtaacgtagtagccgacgatggcggccaggatacaggccggcgccaccacccttccggtcagcccgtaatacatgcccgctgccaccatctccaacggcttcaggaccaaaaacgaccaaaggaacagaatcacgcgctttgaaaagaccggctgggtatggggcggaagacgcgagtatgccgaactgacaaaaaaatcagaggtgccgtacgaggacaatgaaaactgttcctccagcggcagttctccctcctcccccccgaaggcggcctcgtcgaccagatctcgatccaccagaggaaggtcatcccgcatggtcatggggtgtgcggtggaggtggggagaccgaaaccgcaaagggtcgcttacgtcagcaggatcccgagatcaaagacacccgggttcttgcacaaacaccacccgggttgcatccgcggaggcgagtgttttgataaggccgttccgcgccttgatataacctttgatgttgaccacaaaacccggaatttacgcctacgccccaatgcccacgcaagatgaggtaggtaacccccccgtgggtgtgacgttgcgtttagttcattggaggccaaggggaaaaatggggtggggaggaaacggaaaacccagtaggccgtgtcgggaacacgcccggggttgtcctcaaaaggcagggtccatactacggaagccgtcgttgtattcgagacctgcctgtgcgacgcacgtcggggttgcctgtgtccggttcggcccccaccgcgtgcggcacgcacgaggacgagtccgcgtgctttattggcgttccaagcgttgccctccagtttctgttgtcggtgttcccccatacccacgcccacatccaccgtagggggcctctgggccgtgttacgtcgccgcccgcgatggagcttagctacgccaccaccatgcactaccgggacgttgtgttttacgtcacaacggaccgaaaccgggcctactttgtgtgcggggggtgtgtttattccgtggggcggccgtgtgcctcgcagcccggggagattgccaagtttggtctggtcgttcgagggacaggcccagacgaccgcgtggtcgccaactatgtacgaagcgaactccgacaacgcggcctgcaggacgtgcgtcccattggggaggacgaggtgtttctggacagcgtgtgtcttctaaacccgaacgtgagctccgagctggatgtgattaacacgaacgacgtggaagtgctggacgaatgtctggccgagtactgcacctcgctgcgaaccagcccgggtgtgctaatatccgggctgcgcgtgcgggcgcaagacagaatcatcgagttgtttgaacacccaacgatagtcaacgtttcctcgcactttgtgtataccccgtccccatacgtgttcgccctggcccaggcgcacctcccccggctcccgagctcgctggaggccctggtgagcggcctgtttgacggcatccccgccccacgccagccacttgacgcccacaacccgcgcacggatgtggttatcacgggccgccgcgccccacgacccatcgccgggtcgggggcggggtcggggggcgcgggcgccaagcgggccaccgtcagcgagttcgtgcaagtcaaacacattgaccgcgtgggccccgctggcgtttcgccggcgcctccgccaaacaacaccgactcgagttccctggtgcccggggcccaggattccgccccgcccggccccacgctaagggagctgtggtgggtgttttatgccgcagaccgggcgctggaggagccccgcgccgactctggcctcacccgcgaggaggtacgtgccgtacgtgggttccgggagcaggcgtggaaactgtttggctccgcgggggccccgcgggcgtttatcggggccgcgttgggcctgagccccctccaaaagctggccgtttactactatatcatccaccgagagaggcgcctgtcccccttccccgcgctagtccggctcgtaggccggtacacacagcgccacggcctgtacgtccctcggcccgacgacccagtcttggccgatgccatcaacgggctggttcgcgacgcgctggcggccggaaccacagccgagcagctcctcatgttcgaccttctccccccaaaggacgtgccggtgggaagcgacgtgcaggccgacagcaccgctctgctgcgctttatagaatcgcaacgtctcgccgtccccgggggggtgatctcccccgagcacgtcgcgtaccttggtgcgttcctgagcgtgctgtacgctggccgcgggcgcatgtccgcagcaacgcacaccgcgcggctgacaggggtgacctccctggtgctagcggtgggtgacgtggaccgtctttccgcgtttgaccgcggagcggcgggcgcggccagccgcacgcgggccgccgggtacctggatgtgcttcttaccgttcgtctcgctcgctccaaacacggacagtctgtgtaacagaccccaataaacgtatgtcgctaccacacccttgtgtgtcaatggacgcctctccgggggggaagggaaaacaaagaggggctgggggagcggcaccactggggcctgaacaaacaaacaaaccacagacacggttacagtttattcggtcgggcggataaacggccgaagccacgccccctttattcgcgtctccaaaaaaacgggacacttgtccggagaacctttaggatgccagccagggcggcggtaatcataaccacgcccagcgcagaggcggccagaaacccgggcgcaattgcggccacgggctgcgtgtcaaaggctagcaaatgaatgacggttccgtttggaaatagcaacaaggccgtggacggcacgtcgctcgaaaacacgctcggggcgccctccgtcggcccggcggcgatttgctgctgtgtgttgtccgtatccaccagcaacacagacatgacctccccggctggggtgtagcgcataaacacggcccccacgagccccaggtcgcgctggttttgggtgcgcaccagccgcttggactcgatatcccgggtggagccttcgcatgtcgcggtgaggtaggttaggaacagtgggcgtcggacgtcgacgccggtgagcttgtagccgatcccccggggcagaggggagtgggtgacgacgtagctggcgttgtgggtgatgggtaccaggatccgtggctcgacgttggcagactgccccccgcaccgatgtgaggcctcagggacgaaggcgcggatcagggcgttgtagtgtgcccagcgcgtcagggtcgaggcgaggccgtgggtctgctgggccaggacttcgaccggggtctcggatcgggtggcttgagccagcgcgtccaggataaacacgctctcgtctagatcaaagcgcagggaggccgcgcatggcgaaaagtggtccggaagccaaaagagggttttctggtggtcggcccgggccagcgcggtccggaggtcggcgttggtcgctgcggcgacgtcggacgtacacagggccgatgctatcagaaggctccggcgggcgcgttcccgctgcaccgccgaggggacgcccgccaagaacggctgccggaggacagccgaggcgtaaaatagcgcccggtggacgaccggggtggtcagcacgcggccccctagaaactcggcatacagggcgtcgatgagatgggctgcgctgggcgccactgcgtcgtacgccgaggggctatccagcacgaaggccagctgatagcccagcgcgtgtaatgccaagctctgttcgcgctccagaatctcggccaccaggtgctggagccgagcctctagctgcaggcgggccgtgggatccaagactgacacattaaaaaacacagaatccgcggcacagcccgcggccccgcgggcggccaacccggcaagcgcgcgcgagtgggccaaaaagcctagcaggtcggagaggcagaccgcgccgtttgcgtgggcggcgttcacgaaagcaaaacccgacgtcgcgagcagccccgttaggcgccagaagagaggggggcgcgggccctgctcggcgcccgcgtcccccgagaaaaactccgcgtatgcccgcgacaggaactgggcgtagttcgtgccctcctccgggtagccgcccacgcggcggagggcgtccagcgcggagccgttgtcggcccgcgtcagggaccctaggacaaagacccgataccgggggccgcccgggggcccgggaagagcccccggggggttttcgtccgcggggtccccgacccgatctagcgtctggcccgcggggaccaccatcacttccaccggagggctgtcgtgcatggatatcacgagccccatgaattcccgcccgtagcgcgcgcgcaccagcgcggcatcgcacccgagcaccagctcccccgtcgtccagatgcccacgggccacgtcgaggccgacggggagaaatacacgtacctacctggggatctcaacaggccccgggtggccaaccaggtcgtggacgcgttgtgcaggtgcgtgatgtccagctccgtcgtcgggtgccgccgggccccaaccggcggtcgggggggcggtgtatcacgcggcccgcttgggtggctcgccgtcgccacgttgtctccccgcgggaacgtcagggcctcggggtcagggacggccgaaaacgttacccaggcccgggaacgcagcaacacggaggcgactggattgtacaagagacccttaaggggggcgaccgaggggggaggctgggcggtcggctcgaccgtggtgggggcgggcaggctcgcgttcgggggccggccgagcaggtaggtcttcgggatgtaaagcagctggccggggtcccgcggaaactcggccgtggtgaccaatacaaaacaaaagcgctcctcgtaccagcgaagaaggggcagagatgccgtagtcaggtttagttcgtccggcggcgccagaaatccgcgcggtggtttttgggggtcgggggtgtttggcagccacagacgcccggtgttcgtgtcgcgccagtacatgcggtccatgcccaggccatccaaaaaccatgggtctgtctgctcagtccagtcgtggacctgaccccacgcaacgcccaaaataataacccccacgaaccataaaccattccccatgggggaccccgtccctaacccacggggcccgtggctatggcagggcttgccgccccgacgttggctgcgagccctgggccttcacccgaacttggggggtggggtggggaaaaggaagaaacgcgggcgtattggccccaatggggtctcggtggggtatcgacagagtgccagccctgggaccgaaccccgcgtttatgaacaaacgacccaacacccgtgcgttttattctgtctttttattgccgtcatagcgcgggttccttccggtattgtctccttccgtgtttcagttagcctcccccatctcccgggcaaacgtgcgcgccaggtcgcagatcgtcggtatggagccgggggtggtgacgtgggtctggaccatcccggaggtaagttgcagcagggcgtcccggcagccggcgggcgattggtcgtaatccaggataaagacgtgcatgggacggaggcgtttggccaagacgtccaaggcccaggcaaacacgttgtacaggtcgccgttgggggccagcaactcgggggcccgaaacagggtaaataacgtgtccccgatatggggtcgtgggcccgcgttgctctggggctcggcaccctggggcggcacggccgtccccgaaagctgtccccaatcctcccgccacgacccgccgccctgcagataccgcaccgtattggcaagcagcccgtaaacgcggcgaatcgcggccagcatagccaggtcaagccgctcgccggggcgctggcgtttggccaggcggtcgatgtgtctgtcctccggaagggcccccaacacgatgtttgtgccgggcaaggtcggcgggatgagggccacgaacgccagcacggcctggggggtcatgctgcccataaggtatcgcgcggccgggtagcacaggagggcggcgatgggatggcggtcgaagatgagggtgagggccgggggcggggcatgtgagctcccagcctcccccccgatatgaggagccagaacggcgtcggtcacggcataaggcatgcccattgttatctgggcgcttgtcattaccaccgccgcgtccccggccgatatctcaccctggtcgaggcggtgttgtgtggtgtagatgttcgcgattgtctcggaagcccccagcacctgccagtaagtcatcggctcgggtacgtagacgatatcgtcgcgcgaacccagggccaccagcagttgcgtggtggtggttttccccatcccgtgaggaccgtctatataaacccgcagtagcgtgggcattttctgctccaggcggacttccgtggcttcttgctgccggcgagggcgcaacgccgtacgtcggttgctatggccgcgagaacgcgcagcctggtcgaacgcagacgcgtgttgatggcaggggtacgaagccatacgcgcttctacaaggcgcttgccgaagaggtgcgggagtttcacgccaccaagatctgcggcacgctgttgacgctgttaagcgggtcgctgcagggtcgctcggtgttcgaggccacacgcgtcaccttaatatgcgaagtggacctgggaccgcgccgccccgactgcatctgcgtgttcgaattcgccaatgacaagacgctgggcggggtttgtgtcatcatagaactaaagacatgcaaatatatttcttccggggacaccgccagcaaacgcgagcaacgggccacggggatgaagcagctgcgccactccctgaagctcctgcagtccctcgcgcctccgggtgacaagatagtgtacctgtgccccgtcctggtgtttgtcgcccaacggacgctccgcgtcagccgcgtgacccggctcgtcccgcagaaggtctccggtaatatcaccgcagtcgtgcggatgctccagagcctgtccacgtatacggtccccatggagcctaggacccagcgagcccgtcgccgccgcggcggcgccgcccgggggtctgcgagcagaccgaaaaggtcacactctggggcgcgcgacccgcccgagtcagcggcccgccagttaccacccgccgaccaaacccccgcctccacggagggcgggggggtgcttaagaggatcgcggcgctcttctgcgtgcccgtggccaccaagaccaaaccccgagccgcctccgaatgagagtgtttcgttccttccccctccccccgcgtcagacaaaccctaaccaccgcttaagcggcccccgcgaggtccgaagactcatttggatccggcgggagccacccgacaacagcccccgggttttcccacgccagacgccggtccgctgtgccatcgcgccccctcatcccaccccccatcttgtccccaaataaaacaaggtctggtagttaggacaacgaccgcagttctcgtgtgttattttcgctctccgcctctcgcagatggacccgtactgcccatttgacgctctggacgtctgggaacacaggcgcttcatagtcgccgattcccgaaacttcatcacccccgagttcccccgggacttttggatgtcgcccgtctttaacctcccccgggagacggcggcggagcaggtggtcgtcctacaggcccagcgcacagcggctgccgctgccctggagaacgccgccatgcaggcggccgagctccccgtcgatatcgagcgccggttacgcccgatcgaacggaacgtgcacaagatcgcaggcgccctggaggcgctggagacggcggcggccgccgccgaagaggcggatgccgcgcgcggggatgagccggcgggtgggggcgacgggggggcgcccccgagtctggccgtcgcggagatggaggtccagatcgtgcgcaacgacccgccgctacgatacgacaccaacctccccgtggatctgctacacatggtgtacgcgggccgcggggcgaccggatcgtcgggggtggtgttcgggacctggtaccgcactatccaggaccgcaccatcacggactttcccctgaccacccgcagtgccgactttcgggacggccgtatgtccaagaccttcatgacggcgctggtactgtccctgcagtcgtgcggccggctgtatgtgggccagcgccactattccgccttcgagtgcgccgtgttgtgtctctacctgctgtaccgaaacacgcacggggccgccgacgatagcgaccgcgctccggtcacgttcggggatctgctgggccggctgccccgctacctggcgtgcctggccgcggtgatcgggaccgagggcggccggccacagtaccgctaccgcgacgacaagctccccaagacgcagttcgcggccggcgggggccgctacgaacacggagcgctggcgtcgcacatcgtgatcgccacgctgatgcaccacggggtgctcccggcggccccgggggacgtcccccgggacgcgagcacccacgttaaccccgacggcgtggcgcaccacgacgacataaaccgcgccgccgccgcgttcctcagccggggccacaacctattcctgtgggaggaccagactctgctgcgggcaaccgcgaacaccataacggccctgggcgttatccagcggctcctcgcgaacggcaacgtgtacgcggaccgcctcaacaaccgcctgcagctgggcatgctgatccccggagccgtcccttcggaggccatcgcccgtggggcctccgggtccgactcgggggccatcaagagcggagacaacaatctggaggcgctatgtgccaattacgtgcttccgctgtaccgggccgacccggcggtcgagctgacccagctgtttcccggcctggccgccctgtgtcttgacgcccaggcggggcggccggtcgggtcgacgcggcgggtggtggatatgtcatcgggggcccgccaggcggcgctggtgcgcctcaccgccctggaactcatcaaccgcacccgcacaaaccccacccccgtgggggaggttatccacgcccacgacgccctggcgatccaatacgaacaggggcttggcctgctggcgcagcaggcacgcattggcttgggctccaacaccaagcgtttctccgcgttcaacgttagcagcgactacgacatgttgtactttttatgtctggggttcattccacagtacctgtcggcggtttagtgggtggtgggcgaggggggagggggcattagggagaaagaacaagagcctccgttgggttttctttgtgcctgtactcaaaaggtcataccccgtaaacggcgggctccagtcccggcccggcggttggcgtgaacgcaacggcgggagctgggttagcgtttagtttagcattcgctctcgcctttccgcccgccccccgaccgttgcgccttttttttttttcgtccaccaaagtctctgtgggtgcgcgcatggcagccgatgccccgggagaccggatggaggagcccctgccagacagggccgtgcccatttacgtggctgggtttttggccctgtatgacagcggggactcgggcgagttggcattggatccggatacggtgcgtgcggccctgcctccggataacccactcccgattaacgtggaccaccgcgctggctgcgaggtggggcgggtgctggccgtggtcgacgacccccgcgggccgttttttgtgggactgatcgcctgcgtgcaactggagcgcgtcctcgagacggccgccagcgctgcgattttcgagcgccgcgggccgccgctctcccgggaggagcgcctgttgtacctgatcaccaactacctgccctcggtctccctggccacaaaacgcctggggggcgaggcgcaccccgatcgcacgctgttcgcgcacgtcgcgctgtgcgcgatcgggcggcgcctcggcactatcgtcacctacgacaccggtctcgacgccgccatcgcgccctttcgccacctgtcgccggcgtctcgcgagggggcgcggcgactggccgccgaggccgagctcgcgctgtccggacgcacctgggcgcccggcgtggaggcgctgacccacacgctgctttccaccgccgttaacaacatgatgctgcgggaccgctggagcctggtggccgagcggcggcggcaggccgggatcgccggacacacctacctccaggcgagcgaaaaattcaaaatgtggggggcggagcctgtttccgcgccggcgcgcgggtataagaacggggccccggagtccacggacataccgcccggctcgatcgctgccgcgccgcagggtgaccggtgcccaatcgtccgtcagcgcggggtcgcctcgcccccggtactgccccccatgaaccccgttccggcatcgggcaccccggcccccgcgccgcccggcgacgggagctacctgtggatcccggcctcccattacaaccagctcgtcgccggccacgccgcgccccaaccccagccgcattccgcgtttggtttcccggctgcggcgggggccgtggcctatgggcctcacggcgcgggtctttcccagcattaccctccccacgtcgcccatcagtatcccggggtgctgttctcgggacccagcccactcgaggcgcagatagccgcgttggtgggggccatagccgcggaccgccaggcgggcggtcagacggccgcgggagaccctggggtccgggggtcgggaaagcgtcgccggtacgaggcggggccgtcggagtcctactgcgaccaggacgaaccggacgcggactacccgtactaccccggggaggctcgaggcgggccgcgcggggtcgactctcggcgcgcggcccgccagtctcccgggaccaacgagaccatcacggcgctgatgggggcggtgacgtctctgcagcaggaactggcgcacatgcgggctcggaccagcgccccctatggaatgtacacgccggtggcgcactatcgccctcaggtgggggagccggaaccaacaacgacccacccggccctttgtcccccggaggccgtgtatcgccccccaccacacagcgccccctacggtcctccccagggtccggcgtcccatgcccccactcccccgtatgccccagctgcctgcccgccaggcccgccaccgcccccatgtccttccacccagacgcgcgcccctctaccgacggagcccgcgttcccccccgccgccaccggatcccaaccggaggcatccaacgcggaggccggggcccttgtcaacgccagcagcgcagcacacgtggacgttgacacggcccgcgccgccgatttgttcgtctctcagatgatgggggcccgctgattcgccccggtctttggtaccatgggatgtcttactgtatatctttttaaataaaccaggtaataccaaataagacccattggtgtatgttctttttttattgggaggcgcgggtaggcgggtagctttacaatgcaaaagccttcgacgtggaggaaggcgtggggggggaatcggcactgaccaagggggtccgttttgtcacgggaaaggaaagaggaaacaggccgcggacacccgggggagtttatgtgttcccttttctttcttcccacacacacaaaaggcgtaccaaacaaacaaaccaaaagatgcacatgcggtttaacacccgtggtttttatttacaacaaaccccccgtcacaggtcgtcctcgtcggcgtcaccgtctttgttgggaacttgggtgtagttggtgttgcggcgcttgcgcatgaccatgtcggtgaccttggcgctgagcagcgcgctcgtgcccttcttcttggccttgtgttccgtgcgctccatggcagacaccagggccatgtaccgtatcatctcccgggcctcggctagcttggcctcgtcaaagtcgccgccctcctcgccctccccggacgcgtccgggttggtggggttcttgagctccttggtggttagcgggtacagggccttcatggggttgctctgcagccgcatgacgtagcgaaaggcgaagaaagccgccgccaggccggccaggaccaacagacccacggccagcgccccaaaggggttggacatgaaggaggacacgcccgacacggccgataccacgccgcccacgatgcccatcaccaccttgccgaccgcgcgccccaggtcgcccatcccctcgaagaacgcgcccaggcccgcgaacatggcggcgttggcgtcggcgtggatgaccgtgtcgatgtcggcgaagcgcaggtcgtgcagctggttgcggcgctggacctccgtgtagtccagcaggccgctgtccttgatctcgtggcgggtgtacacctccagggggacaaactcgtgatcctccagcatggtgatgttgaggtcgatgaaggtgctgacggtggtgatgtcggcgcggctcagctggtgggagtacgcgtactcctcgaagtacacgtagcccccgccgaaggtgaagtagcgccggtgtcccacggtgcacggctcgatcgcatcgcgcgtcagccgcagctcgttgttctcccccagctgcccctcgaccaacgggccctggtcttcgtaccgaaagctgaccagggggcggctgtagcaggccccgggccgcgagctgatgcgcatcgagttttggacgatcacgttgtccgcggcgaccggcacgcacgtggagacggccatcacgtcgccgagcatccgcgcgctcacccgccggcccacggtggccgaggcgatggcgttggggttcagcttgcgggcctcgttccacagggtcagctcgtgattctgcagctcgcaccacgcgatggcaacgcggcccaacatatcgttgacatggcgctgtatgtggttgtacgtaaactgcagccgggcgaactcgatggaggaggtggtcttgatgcgctccacggacgcgttggcgctggccccgggcggcgggggcgtggggtttgggggcttgcggctctgctctcggaggtgttcccgcacgtacagctccgcgagcgtgttgctgagaaggggctggtacgcgatcagaaagcccccattggccaggtagtactgcggctggcccaccttgatgtgcgtcgcgttgtacctgcgggcgaagatgcggtccatggcgtcgcgggcgtccttgccgatgcagtcccccaggtccacgcgcgagagcgggtactcggtcaggttggtggtgaaggtggtggatatggcgtcggaggagaatcggaaggagccgccgtactcggagcgcagcatctcgtccacctcctgccacttggtcatggtgcagaccgacgggcgctttggcacccagtcccaggccacggtgaacttgggggtcgtgagcaggttccgggtggtcggcgccgtggcccgggccttggtggtgaggtcgcgcgcgtagaagccgtcaacctgcttgaagcggtcggcggcgtagctggtgtgttcggtgtgcgacccctcccggtagccgtaaaacggggacatgtacacaaagtcgccagtcgccagcacaaactcgtcgtacgggtacaccgagcgcgcgtccacctcctcgacgatgcagtttaccgtcgtcccgtaccggtggaacgcctccacccgcgaggggttgtacttgaggtcggtggtgtgccagccccggctcgtgcgggtcgcggcgttggccggtttcagctccatgtcggtctcgtggtcgtcccggtgaaacgcggtggtctccaggttgttgcgcacgtacttggccgtggaccgacagacccccttggcgttgatcttgtcgatcacctcctcgaaggggacgggggcgcggtcctcaaagatccccataaactgggagtagcggtggccgaaccacacctgcgaaacggtgacgtctttgtagtacatggtggccttgaacttgtacggggcgatgttctccttgaagaccaccgcgatgccctccgtgtagttctgaccctcgggccgggtcgggcagcggcgcggctgctcgaactgcaccaccgtggcgcccgtggggggtgggcacacgtaaaagtttgcatcggtgttctccgccttgatgtcccgcaggtgctcgcgcagggtggcgtggcccgcggcgacggtcgcgttgtcgccggcggggcgcggcggcggtgggtttttcggttttttgttcttcttcggtttcgtgtcccccgttggggcggggccaggggcgggcggcgccggagtggcaggtcccccgttcgccgcctgggtcgcggccgcgaccccaggcgtgccgggggaactcggagccgccgacgccaccaggacccccagcgtcaaccccaagagcgcccatacgacgaaccaccggcacccccgcgcgggggcgccctggcgcatggcgggactacgggggcccgtcgtgccccccgtcaggtagcctgggggcgaggtgctggaggaccgagtagaggatcgagaaaacgtctcggtcgtagaccacgaccgaccgggggccgatacagccgtcgggggcgctctcgacgatggccaccagcggacagtcggagtcgtacgtgagatatacgccgggcgggtaacggtaacgaccttcggaggtcgggcggctgcagtccgggcggcgcaactcgagctccccgcaccggtagaccgaggcaaagagtgtggtggcgataatcagctcgcgaatatatcgccaggcggcgcgctgagtgggcgttattccggaaatgccgtcaaaacagtaaaacctctgaaattcgctgacggcccaatcagcacccgagccccccgcccccatgatgaaccgggcgagctcctccttcaggtgcggcaggagccccacgttctcgacgctgtaatacagcgcggtgttggggggctgggcgaagctgtgggtggagtgatcaaagaggggcccgttgacgagctcgaagaagcgatgggtgatgctggggagcagggccgggtccacctggtgtcgcaggagagacgctcgcatgaaccggtgcgcgtcgaacacgcccggcgccgagcggttgtcgatgaccgtgcccgcgcccgccgtcagggcgcagaagcgcgcgcgcgccgcaaagccgttggcgaccgcggcgaacgtcgcgggcagcacctcgccgtggacgctgacccgcagcatcttctcgagctccccgcgctgctcgcggacgcagcgccccaggctggccaacgaccgcttcgtcaggcggtccgcgtacagccgccgtcgctcccgcacgtccgcggccgcttgcgtggcgatgtccccccacgtctcgggcccctgccccccgggcccgcggcgacggtcttcgtcctcgcccccgcccccgggagctcccaacccccgtgccccttcctctacggcgacacggtccccgtcgtcgtcggggcccgcgccgcccttgggcgcgtccgccgcgccccccgcccccatgcgcgccagcacgcgacgcagcgcctcctcgtcgcactgttcggggctgacgaggcgccgcaagagcggcgtcgtcaggtggtggtcgtagcacgcgcggatgagcgcctcgatctgatcgtcgggtgacgtggcctgaccgccgattattagggcgtccaccatatccagcgccgccaggtggctcccgaacgcgcgatcgaaatgctccgcccgccgcccgaacagcgccagttccacggccaccgcggcggtctcctgctgcaactcgcgccgcgccagcgcggtcaggttgctggcaaacgcgtccatggtggtctggccggcgcggtcgccggacgcgagccagaatcgcaattcgctgatggcgtacaggccgggcgtggtggcctgaaacacgtcgtgcgcctccagcagggcgtcggcctccttgcggaccgagtcgttctcgggcgacgggtggggctgcccgtcgccccccgcggtccgggccagcgcatggtccaacacggagagcgcccgcgcgcggtcggcgtccgacagcccggcggcgtggggcaggtaccgccgcagctcgttggcgtccagccgcacctgcgcctgctgggtgacgtggttacagatacggtccgccaggcggcgggcgatcgtcgccccctggttcgccgtcacacacagttcctcgaaacagaccgcgcaggggtgggacgggtcgctaagctccggggggacgataaggcccgaccccaccgcccccaccataaactcccgaacgcgctccagcgcggcggtggcgccgcgcgagggggtgatgaggtggcagtagtttagctgctttagaaagttctcgacgtcgtgcaggaaacacagctccatatggacggtcccgccatacgtatccagcctgacccgttggtgatacggacagggtcgggccaggcccatggtctccgtgaaaaacaccgcgacgtctcccgcggtcgcgaacgtctccaggctgcccaggagccgctcgccctcgcgccacgcgtactctagcagcaactccagggtgaccgacagcggggtgagaaaggccccggcctgggcctccaggcccggcctcagacgacgccgcagcgcccgcacctgaagcgcgttcagcttcagttgggggagcttcccccgtccgatgtgggggtcgcaccgccggagcagctctatctgaaacacataggtctgcacctgtccgagcagggctaacaacttttgacgggccacggtgggctcggacaccggggcggccatctcgcggcgccgatctgtaccgcggccggagtatgcggtggaccgaggcggtccgtacgctacccggcgtctggctgagccccggggtccccctattcggggcggcctcccgcgggcccgccgaccggcaagccgggagtcggcggcgcgtgcgtttctgttctattcccagacaccgcggagaggaatcacggcccgcccagagatatagacacggaacacaaacaagcacggatgtcgtagcaataatttattttacacacattccccgccccgccctaggttcccccaccccccaacccctcacagcatatccaacgtcaggtctccctttttgtcggggggcccctccccaaacgggtcatccccgtggaacgcccgtttgcggccggcaaatgccggtcccggggcccccgggccgccgaacggcgtcgcgttgtcgtcctcgcagccaaaatccccaaagttaaacacctccccggcgttgccgagttggctgactagggcctcggcctcgtgcgccacctccagggccgcgtccgtcgaccactcgccgttgccgcgctccagggcacgtgcggtcagctccatcatctcctcgcttaggtactcgtcctccaggagcgccagccagtcctcgatctgcagctgttgggtgcggggccccaggcttttcacggtcgccacgaacacgctactggcgacggccgccccgccctcggagataatgccccggagctgctcgcacagcgagctttcgtgcgctccgccgccgaggctcgaggccgcgcacacaaacccggcccggggacaggccaggacgaacttgcgggtgcggtcaaaaataaggagcgggcacgcgtttttgccgcccatcaggctggcccagttcccggcctgaaacacacggtcgttgccggccatgccgtagtatttgctgatgctcaaccccaacacgaccatggggcgtgccgccatgacgggccgcagcaggttgcagctggcgaacatggaggtccacgcgcccggatgcgcgtccacggcgtccatcagcgcgcgggccccggcctccaggcccgccccgccctgcgcggaccacgcggccgccgcctgcacgctggggggacggcgggaccccgcgatgatggccgtgagggtgttgatgaagtacgtcgagtgatcgcagtaccgcagaatctggtttgccatgtagtacatcgccagctcgctcacgttgttgggggccaggttaataaagttgatcgcgccgtagtccagggaaaactttttaatgaacgcgatggtctcgatgtcctcgcgcgacaggagccgggcgggaagctggttgcgttggagggccgtccagaaccactgcgggttcggctggttggaccccgggggcttgccgttggggaagatggccgcgtggaactgcttcagcagaaagcccagcggtccgaggaggatgtccacgcgcttgtcgggcttctggtaggcgctctggaggctggcgacccgcgccttggcggcctcggacgcgttggcgctcgcgcccgcgaacaacacgcggctcttgacgcgcagctccttgggaaaccccagggtcacgcgggcaacgtcgccctcgaagctgctctcggcgggggccgtctggccggccgtcaggctgggggcgcagatagccgcaccctccgagagcgcgaccgtcagcgttttggccgacagaaacccgttgttaaacatgtccatcacgcgccgccgcagcaccggttggaattgattgcgaaagttgcgcccctcgaccgactgcccggcgaacaccccgtggcactggctcagggccaggtcctggtacacggcgaggttggatcgccgcccgagaagctgaagcagggggcacggcccgcacgcgtacgggtccagcgtcagggacatggcgtggttggcctcgcccagaccgtcgcgaaacttgaagttcctcccctccaccaggttgcgcatcagctgctccacctcgcggtccacgacctgcctgacgttgttcaccaccgtatgcagggcctcgcggttggtgatgatggtctccagccgccccatggccgtggggaccgcctggtccacgtactgcagggtctcgagttcggccatgacgcgctcggtcgccgcgcggtacgtctcctgcatgatggtccgggcggtctcggatccgtccgcgcgcttcagggccgagaaggcggcgtagtttcccagcacgtcgcagtcgctgtacatgctgttcatggtcccgaagacgccgatggctccgcgggcggcgctggcgaacttgggatggcgcgcccggaggcgcatgagcgtcgtgtgtacgcaggcgtggcgcgtgtcgaaggtgcacaggttacagggcacgtcggtctggttggagtccgcgacgtatcgaaacacgtccatctcctggcgcccgacgatcacgccgccgtcgcagcgctccaggtaaaacagcatcttggccagcagcgccggggaaaacccacacagcatggccaggtgctcgccggcaaattcctgggttccgccgacgaggggcgcggtgggccgaccctcgaacccgggcaccacgtgtccctcgcggtccacctgtgggttggccgccacgtgggtcccgggcacgaggaagaagcggtaaaaggagggtttgctgtggtcctttgggtccgccgggccggcgtcgtccacctcggtgagatggagggccgagttggtgctaaataccatggcccccacgagtcccgcggcgcgcgccaggtacgccccgacggcgttggcgcgggccgcggccgtgtcctggccctcgaacagcggccacgcggagatgtcggtgggcggctcgtcaaagacggccatcgacacgatagactcgagggccagggcggcgtctccggccatgacggaggccaggcgctgttcgaacccgcccgcagggcccttgccgccgccgtcgcgcccgccccgcggggtcttaccctggctggcttcgaaggccgtgaacgtaatgtcggcggggagggcggcgccctcgtggttttcgtcaaacgccaggtgggcggccgcgcgggccacggcgtccacgtttcggcatcgcagtgccacggcggcgggtcccacgaccgcctcgaacaggaggcggtggagggggcggttaaaaaacggaagcgggtaggtaaaattctccccgatcgatcggtggttggcgttgaacggctctgcgatgacacggctaaaatccggcatgaacagctgcaacgggtacacgggtatgcggtgcacctccgccccgcctatggttaccttgtccgagcctcccaggtgcagaaaggtgttgttgatgcacacggcctccttgaagccctcggtaacgaccagatacaggagggcgcggtccgggtccaggccgaggcgctcacacagcgcctcccccgtcgtctcgtgtttgaggtcgccgggccggggggtgtagtccgaaaagccaaaatggcggcgtgcccgctcgcagagtcgcgtcaggttcggggcctgggtgctggggtccaggtgccggccgccgtgaaagacgtacacggacgagctgtagtgcgagggcgtcagtttcagggacaccgcggtacccccgagccccgtcgtgcgagaacccacgaccacggccacgttggcctcaaagccgctctccacggtcaggcccacgaccaggggcgccacggcgacgtcggcatcgccgctgcgcgccgacagtaacgccagaagctcgatgccttcggacggacacgcgcgagcgtacacgtatcccaggggcccgggggggaccttgatggtggttgccgtcttgggctttgtctccatgtccttctgtcaatcggtccgcgaacggaggtaatcccggcacgacgacggacgcccgacaaggtatgtctcccgagcgtcaaaatccgggggggggggcggcgacggtcaaggggagggttggagaccggggttggggaatgaatccctacccttcaccgacaaccccccgggtaatcacggggtgccgatgaaccccggcggccggcaacgcggggtccctgcgagaggcacagatgcttacggtcaggtgctccgggtcgggtgcgtctggtatgcggttggtatatgtacactttacctgggggcgtgcctggccgccccagcccctcccacgccctgcgcgtcatcagccggtgggcgtggccgctattataaaaaaagtgagaacgcgaagcgttcgcactttgtcctaataatatatatattattaggacaaagtgcgaacgcttcgcgttctcactttttttataatagcggccacgcccaccggctacgtcacgctcctgtcggccgccggcggtccataagcccggccggccgggccgacgcgaataaaccgggccgccggccggggcgccgcgcagcagctcgccgcccggatccgccagacaaacaaggcccttgcacatgccggcccgggcgagcctgggggtccggtaattttgccatcccacccaagcggctttttgggtttttctcttcccccctccccacatcccccctctttaggggttcgggtggtaacaaccgcgatgttttccggtggcggcggcccgctgtcccccggaggaaagtcggcggccagggcggcgtccgggttttttgcgcccgccggccctcgcggagccggccggggacccccgccttgcttgaggcaaaacttttacaacccctacctcgccccagtcgggacgcaacagaagccgaccgggccaacccagcgccatacgtactatagcgaatgcgatgaatttcgattcatcgccccgcgggtgctggacgaggatgcccccccggagaagcgcgccggggtgcacgacggtcacctcaagcgcgcccccaaggtgtactgcgggggggacgagcgcgacgtcctccgcgtcgggtcgggcggcttctggccgcggcgctcgcgcctgtggggcggcgtggaccacgccccggcggggttcaaccccaccgtcaccgtctttcacgtgtacgacatcctggagaacgtggagcacgcgtacggcatgcgcgcggcccagttccacgcgcggtttatggacgccatcacaccgacggggaccgtcatcacgctcctgggcctgactccggaaggccaccgggtggccgttcacgtttacggcacgcggcagtacttttacatgaacaaggaggaggtcgacaggcacctacaatgccgcgccccacgagatctctgcgagcgcatggccgcggccctgcgcgagtccccgggcgcgtcgttccgcggcatttccgcggaccacttcgaggcggaggtggtggagcgcaccgacgtgtactactacgagacgcgccccgctctgttttaccgcgtctacgtccgaagcgggcgcgtgctgtcgtacctgtgcgacaacttctgcccggccatcaagaagtacgagggtggggtcgacgccaccacccggttcatcctggacaaccccgggttcgtcaccttcggctggtaccgtctcaaaccgggccggaacaacacgctagcccagccgcgggccccgatggccttcgggacatccagcgacgtcgagtttaactgtacggcggacaacctggccatcgaggggggcatgagcgacctaccggcatacaagctcatgtgcttcgatatcgaatgcaaggcggggggggaggacgagctggcctttccggtggccgggcacccggaggacctggtcatccagatatcctgtctgctctacgacctgtccaccaccgccctggagcacgtcctcctgttttcgctcggttcctgcgacctccccgaatcccacctgaacgagctggcggccaggggcctgcccacgcccgtggttctggaattcgacagcgaattcgagatgctgttggccttcatgacccttgtgaaacagtacggccccgagttcgtgaccgggtacaacatcatcaacttcgactggcccttcttgctggccaagctgacggacatttacaaggtccccctggacgggtacggccgcatgaacggccggggcgtgtttcgcgtgtgggacataggccagagccacttccagaagcgcagcaagataaaggtgaacggcatggtgaacatcgacatgtacgggattataaccgacaagatcaagctctcgagctacaagctcaacgccgtggccgaagccgtcctgaaggacaagaagaaggacctgagctatcgcgacatccccgcctactacgccgccgggcccgcgcaacgcggggtgatcggcgagtactgcatacaggattccctgctggtgggccagctgttttttaagtttttgccccatctggagctctcggccgtcgcgcgcttggcgggtattaacatcacccgcaccatctacgacggccagcagatccgcgtctttacgtgcctgctgcgcctggccgaccagaagggctttattctgccggacacccaggggcgatttaggggcgccgggggggaggcgcccaagcgtccggccgcagcccgggaggacgaggagcggccagaggaggagggggaggacgaggacgaacgcgaggagggcgggggcgagcgggagccggagggcgcgcgggagaccgccggccggcacgtggggtaccagggggccagggtccttgaccccacttccgggtttcatgtgaaccccgtggtggtgttcgactttgccagcctgtaccccagcatcatccaggcccacaacctgtgcttcagcacgctctccctgagggccgacgcagtggcgcacctggaggcgggcaaggactacctggagatcgaggtgggggggcgacggctgttcttcgtcaaggctcacgtgcgagagagcctcctcagcatcctcctgcgggactggctcgccatgcgaaagcagatccgctcgcggattccccagagcagccccgaggaggccgtgctcctggacaagcagcaggccgccatcaaggtcgtgtgtaactcggtttacgggttcacgggagtgcagcacggactcctgccgtgcctgcacgttgccgcgacggtgacgaccatcggccgcgagatgctgctcgcgacccgcgagtacgtccacgcgcgctgggcggccttcgaacagctcctggccgatttcccggaggcggccgacatgcgcgcccccgggccctattccatgcgcatcatctacggggacacggactccatctttgtgctgtgccgcggcctcacggccgccgggctgacggccgtgggcgacaagatggcgagccacatctcgcgcgcgctgtttctgtcccccatcaaactcgagtgcgaaaagacgttcaccaagctgctgctgatcgccaagaaaaagtacatcggcgtcatctacgggggtaagatgctcatcaagggcgtggatctggtgcgcaaaaacaactgcgcgtttatcaaccgcacctccagggccctggtcgacctgctgttttacgacgataccgtatccggagcggccgccgcgttagccgagcgccccgcagaggagtggctggcgcgacccctgcccgagggactgcaggcgttcggggccgtcctcgtagacgcccatcggcgcatcaccgacccggagagggacatccaggactttgtcctcaccgccgaactgagcagacacccgcgcgcgtacaccaacaagcgcctggcccacctgacggtgtattacaagctcatggcccgccgcgcgcaggtcccgtccatcaaggaccggatcccgtacgtgatcgtggcccagacccgcgaggtagaggagacggtcgcgcggctggccgccctccgcgagctcgacgccgccgccccaggggacgagcccgccccccccgcggccctgccctccccggccaagcgcccccgggagacgccgttgcatgccgaccccccgggaggcgcgtccaagccccgcaagctgctggtgtccgagctggccgaggatcccgcatacgccattgcccacggcgtcgccctgaacacggactattacttctcccacctgttgggggcggcgtgcgtgacattcaaggccctgtttgggaataacgccaagatcaccgagagtctgttaaaaaggtttattcccgaagtgtggcaccccccggacgacgtggccgcgcggctccgggccgcagggttcggggcggtgggtgccggcgctacggcggaggaaactcgtcgaatgttgcatagagcctttgatactctagcatgagccccccgtcgaagctgatgtccctcattttacaataaatgtctgcggccgacacggtcggaatctccgcgtccgtgggtttctctgcgttgcgccggaccacgagcacaaacgtgctctgccacacgtgggcgacgaaccggtaccccgggcacgcggtgagcatccggtctatgagccggtagtgcaggtgggcggacgtgccgggaaagatgacgtacagcatgtggcccccgtaagtggggtccgggtaaaacaacagccgcgggtcgcacgccccgcctccgcgcaggatcgtgtggacgaaaaaaagctcgggttggccaagaatcccggccaagaggtcctggaggggggcgttgtggcggtcggccaacacgaccaaggaggccaggaaggcgcgatgctcgaatatcgtgttgatctgctgcacgaaggccaggattagggcctcgcggctggtggcggcgaaccgcccgtctcccgcgttgcacgcgggacagcaacccccgatgcctaggtagtagcccatcccggagagggtcaggcagttgtcggccacggtctggtccagacagaagggcagcgagacgggagtggtcttcaccaggggcaccgagagcgagcgcacgatggcgatctcctcggagggcgtctgggcgagggcggcgaaaaggccccgatagcgctggcgctcgtgtaaacacagctcctgtttgcgggcgtgaggcggcaggctcttccgggaggcccgacgcaccacgcccagagtcccgccggccgcagaggagcgcgaccgccggcgctccttgccgtgatagggcccgggccgggagccgcggcgatgggggtcggtgtcatacataggtacacagggtgtgctccagggacaggagcgagatcgagtggcgtctaagcagcgcgcccgcctcacggacaaatgtggcgagcgcggtgggctttggtacaaatacctgatacgtcttgaaggtgtagatgagggcacgcaacgctatgcagacacgcccctcgaactcgttcccgcaggccagcttggccttgtggagcagcagctcgtcgggatgggtggcggggggatggccgaacagaacccaggggtcaacctccatctccgtaatggcgcacatggggtcacagaacatgtgcttaaagatggcctcgggccccgcggcccgaagcaggctcacaaaccggcccccgtccccgggctgcgtctcggggtcagcctcgagctggtcgacgacgggtacgatacagtcgaagaggctcgtgttgttttccgagtagcggaccacggaggcccggagtctgcgcagggccagccagtaagcacgcaccagtaacaggttacacagcaggcattctccgccggtgcgcccgcgcccccggccgtgtttcagcacggtggccatcagagggcccaggtcgaggtcgggctgggcatcgggttcggtaaactgcgcaaagcgcggagccacgtcgcgcgtgcgtgccccgcgatgcgcttcccaggactggcggaccgtggcgcgacgggcctccgcggcagcgcgcagctggggccccgactcccagacggcgggggtgccggcgaggagcagcaggaccagatccgcgtacgcccacgtatccggcgactcctccggctcgcggtccccggcgaccgtctcgaattccccgttgcgagcggcggcgcgcgtacagcagctgtccccgcccccgcgccgaccctccgtgcagtccaggagacgggcgcaatccttccagttcatcagcgcggtggtgagcgacggctgcgtgccggatcccgccgaccccgccccctcctcgcccccggaggccaaggttccgatgagggcccgggtggcagactgcgccaggaacgagtagttggagtactgcaccttggcggctcccggggagggcgagggcttgggttgcttctgggcatgccgcccgggcaccccgccgtcggtacggaagcagcagtggagaaaaaagtgccggtggatgtcgtttatggtgagggcaaagcgtgcgaaggagccgaccagggtcgccttcttggtgcgcagaaagtggcggtccatgacgtacacaaactcgaacgcggccacgaagatgctagcggcgcagtggggcgcccccaggcatttggcacagagaaacgcgtaatcggccacccactgaggcgagaggcggtaggtttgcttgtacagctcgatggtgcggcagaccagacagggccggtccagcgcgaaggtgtcgatggccgccgcggaaaagggcccggtgtccaaaagcccctccccacagggatccgggggcgggttgcggggtcctccgcgcccgcccgaaccccctccgtcgcccgcccccccgcgggcccttgagggggcggtgaccacgtcggcggcgacgtcctcgtcgagcgtaccgacgggcggcacacctatcacgtgactggccgtcaggagctcggcgcagagagcctcgttaagagccaggaggctgggatcgaaggccacatacgcgcgctcgaacgcccccgccttccagctgctgccgggggactcttcgcacaccgcgacgctcgccaggaccccggggggcgaagttgccatggctgggcgggaggggcgcacgcgccagcgaactttacgggacacaatccccgactgcgcgctgcggtcccagaccctggagagtctagacgcgcgctacgtctcgcgagacggcgcgcatgacgcggccgtctggttcgaggatatgacccccgccgagctggaggttgtcttcccgactacggacgccaagctgaactacctgtcgcggacgcagcggctggcctccctcctgacgtacgccgggcctataaaagcgcccgacgacgccgccgccccgcagaccccggacaccgcgtgtgtgcacggcgagctgctcgcccgcaagcgggaaagattcgcggcggtcattaaccggttcctggacctgcaccagattctgcggggctgacgcgcgtgctgttgggcgggacggttcgcgaaccctttggtgggtttacgcgggcacgcacgctcccatcgcgggcgccatggcgggactgggcaagccctacaccggccacccaggtgacgccttcgagggtctcgttcagcgaattcggcttatcgtcccatctacgttgcggggcggggacggggaggcgggcccctactctccctccagcctcccctccaggtgcgcctttcagtttcatggccatgacgggtccgacgagtcgtttcccatcgagtatgtactgcggcttatgaacgactgggccgaggtcccgtgcaacccttacctgcgcatacagaacaccggcgtgtcggtgctgtttcaggggttttttcatcgcccacacaacgcccccgggggcgcgattacgccagagcggaccaatgtgatcctggggtccaccgagacgacggggttgtccctcggcgacctggacaccatcaaggggcggctcggcctggatgcccggccgatgatggccagcatgtggatcagctgctttgtgcgcatgccccgcgtgcagctcgcgtttcggttcatgggccccgaagatgccggacggacgagacggatcctgtgccgcgccgccgagcaggctattacccgtcgccgccgaacccggcggtcccgggaggcgtacggggccgaggccgggctgggggtggccggaacgggtttccgggccaggggggacggttttggcccgctccccttgttaacccaagggccctcccgcccgtggcaccaggccctgcggggtcttaagcacctacggattggcccccccgcgctcgttttggcggcgggactcgtcctgggggccgctatttggtgggtggttggtgctggcgcgcgcctataaaaaaggacgcaccgccgccctaatcgccagtgcgttccggacgccttcgccccacacagccctcccgaccgacacccccatatcgcttcccgacctccggtcccgatggccgtcccgcaatttcaccgccccagcaccgttaccaccgatagcgtccgggcgcttggcatgcgcgggctcgtcttggccaccaataactctcagtttatcatggataacaaccacccacacccccagggcacccaaggggccgtgcgggagtttctccgcggtcaggcggcggcactgacggaccttggtctggcccacgcaaacaacacgtttaccccgcagcctatgttcgcgggcgacgcaccggccgcctggttgcggcccgcgtttggcctgcggcgcacctattcaccttttgtcgttcgagaaccttcgacgcccgggaccccgtgaggcccagggagttccttctggggtgttttaatcaataaaagaccacaccaacgcacgagccttgcgtttaatgtcgtgtttattcaagggagtgggatagggttcgacggttcgaaacttaacacaccaaataatcgagcgcgtctagcccagtaacatgcgcacgtgatgtaggctggtcagcacggcgtcgctgtgatgaagcagcgcccggcgggtccgctgtaactgctgttgtaggcggtaacaggcgcggatcagcaccgccagggcgctacgaccggtgcgttgcacgtagcgtcgcgacagaactgcgtttgccgatacgggcggggggccgaattgtaagcgcgtcacctcttgggagtcatcggcggataacgcactgaatggttcgttggttatgggggagtgtggttccccagggagtgggtcgagcgcctcggcctcggaatccgagaggaacaacgaggtggcgtcggagtcttcgtcgtcagagacatacagggtctgaagcagcgacacgggcgggggggtagcgtcgatgtgtagcgcgagggaggatgcccacgaagacaccccagacaaggagctgcccgtgcgtggatttgtggaagacgcggaagccgggacggatgggcggttttgcggtgcccggaaccgaaccgccggatactccccgggtgctacatgcccgttttggggctggggttggggctggggttggggctggggttggggctggggttggggctggggttggggctggggttggggttggggttggggctggggttggggttggggctggggctggggctggggctggggctggggctggggctggggctggggctggggctggggctggggctggggctggggctggggctggggctggggttggggcgcggacaggcggctgacggtcaaatgcccccgggggcgcgcagatgtggtgggcgtggccaccggctgccgtgtagtggggcggcgggaaaccgggcctccgggcgtaacaccgccctccagcgtcaagtatgtggggggcgggcctgacgtcgggggcggggtgacgggttggaccgcgggaggcgggggagagggacctgcgggagaggatgaggtcggctcggccgggttgcggcctaaaacaggggccgtggggtcggcggggtcccagggtgaagggagggattcccgcgattcggacagcgacgcgacagcggggcgcgtaaggcgccgctgcggcccgcctacgggaaccctggggggggttggcgcgggacccgaggttagcggggggcggcggttttcgcccccgggcaaaaccgtgccggttgcgaccgggggcggaacgggatcgatagggagagcgggagaagcctggccggcggactggggaccgagcgggaggggcacaccagacaccaaagcgtggggcgctggctctgggggtttgggaggggccggggggcgcgcgaaatcggtaaccggggcgaccgtgtcggggagggcaggcggccgccaaccctgggtggtcgcggaagcctgggtggcgcgcgccagggagcgtgcccggcggtgtcggcgcgcgcgcgacccggacgaagaagcggtagaagcgcgggaggaggcgggggggcggggggcggtggcatcggggggcgccggggaactttggggggacggcaagcgccggaagtcgtcgcgggggcccacgggcgccggccgcgtgctttcggccgggacgcccggtcgtgcttcgcgagccgtgactgccggcccagggggccgcggtgcacactgggacgtggggacggactgatcggcggtgggcgaaagggggtccggggcaaggaggggcgcggggccgccggagtcgtcagacgcgagctcctccaggccgtgaatccatgcccacatgcgaggggggacgggctcgccgggggtggcgtcggtgaatagcgtgggggccaggcttccgggccccaacgagccctccgccccaacaaggtccgccgggccgggggtcgggttcgggaccgaggggctctggtcgtcgggggcgcgctggtacaccggatgccccgggaatagctcccccgacaggagggaggcgtcgaacggccgcccgaggatagctcgcgcgaggaaggggtcctcgtcggtggcgctcgcggcgaggacgtcctcgccgcccgccacaaacgggagctcctcggtggcctcgctgccaacaaaccgcatgtcgggggggccgggggggtccgggttttcccacaacaccgcgaccggggtcatggagatgtccacgagcaccaggcacggcgggccccgggcgaggggccgctcggcgatgagcgcggacaggcgcgggagctgtgccgccagacacgcgttttcgatcgggttaaggtcggcgtgcaggaggcggacggcccacgtctcgatgtcggacgacacggcatcgcgcaaggcggcgtccggcccgcgagcgcgtgagtcaaacagcgtgaggcacagctccagttccgactcgcgggaaaaggccgtggtgttgcggagcgccacgacgacgggcgcgcccaggagcactgccgccagcaccaggtccatggccgtaacgcgcgccgcgggggtgcggtgggtggcggcggccggcacggcgacgtgctggcccgtgggccggtagagggcgttggggggagcggggggtgacgcctcgcgcccccccgaggggctcagcgtctgcccagattccagacgcgcggtcagaagggcgtcgaaactgtcatactctgtgtagtcgtccggaaacatgcaggtccaaagagcggccagcgcggtgcttgggagacacatgcgcccgaggacgctcaccgccgccagcgcctgggcgggactcagctttcccagcgcggcgccgcgctcggttcccagctcggggaccgagcgccagggcgccagggggtcggtttcggacaacttgccgcggcgccagtctgccagccgcgtgccgaacatgaggccccgggtcggagggcctccggccgaaaacgctggcagcacgcggatgcgggcgtctggatgcggggtcaggcgctgcacgaatagcatggaatctgctgcgttctgaaacgcacgggggagggtgagatgcatgtactcgtgttggcggaccagatccaggcgccaaaaggtgtaaatgtgttccggggagctggccaccagcgccaccagcacgtcgttctcgttaaaggaaacgcggtgcctagtggagctctggggtccgagcggcggccccggggccgccgcgtcacccccccattccagctgggcccagcgacacccaaactcgcgcgtgagagtggtcgcgacgagggcgacgtagagctcggccgccgcatccatcgaggccccccatctcgcctggcggtggcgcacaaagcgtccgaagagctgaaagttggcggcctgggcgtcgctgagggccagctgaagccggttgatgacggtgaggacgtacatggccgtgacggtcgaggccgactccagggtgtccgtcggaagcggggggcgaatgcatgccgcctcgggacacatcagcagcgcgccgagcttgtcggtcacggccgggaagcagagcgcgtactgcagtggcgttccatccgggaccaaaaagctgggggcgaacggcctatccagcgtactggtggcctcgcgcagcaccaggggccccgggcctccgctcactcgcaggtacgcctcgccccggcggcgcagcatctgcgggtcggcctcttggccgggtggggcggacgcccgggcgcgggcgtctagggcgcgaagatccacgagcaggggcgcgggcgcggccgccgcgcccgcgcccgtctggcctgtggccttggcgtacgcgctatataagcccatgcggcgttggatgagctcccgcgcgccccggaactcctccaccgcccatggggccaggtccccggccaccgcgtccaattccgccaacaggccccccagggtgtcaaagttcatctcccaggccacccttggcaccacctcgtcccgcagccgggcgctcaggtcggcgtgttgggccacgcgccccccgagctcctccacggccccggcccgctcggcgctcttggcgcccaggacgccctggtacttggcgggaaggcgctcgtagtcccgctgggctcgcagccccgacacagtgttggtggtgtcctgcagggcgcgaagctgctcgcatgccgcgcgaaatccctcgggcgatttccaggcccccccgcgaacgcggccgaagcgaccccatacctcgtcccactccgcctcggcctcctcgaaagacctccgcagggcctcgacgcggcgacgggtgtcgaagagcgactgcaggcgcgcgccctgtcgcgtcaggaggcccgggccgtcgccgctggccgcgcttagcgggtgcgtctcaaaggtgcgctgggcatgttccaaccaggcgaccgcctgcacgtcgagctcgcgcgccttctccgtctggtccaacagaatctcgacctgatccgcgatctcctccgccgagcgcgcctggtccagcgtcttggccacggtcgccgggacggcaaccaccttcagcagggtcttcagattggccagaccctcggcctcgagctgggcccggcgctcgcgcgcggccagcacctcccgcaaccccgccgtgacccgctcggtggcttcggcgcgctgctgtttggcgcgcaccacggcgtccttggtatcggccaggtcctgtcgggtcacgaatgcgacgtagtcggcgtacgccgtgtccttcacggggctctggtccacgcgctccagcgccgccacacacgccaccagcgcgtcctcgctcgggcagggcagggtgacccctgcccggacaagctcggcggccgccgccgggtcgttgcgcaccgcggatatctcctccgcggcggcggccaggtccagcgccacgcttccgatcgcgcgccgcgcgtcggcccggagggcgtccaggcgatcgcggatatccacgtactcggcgtagcccttttgaaaaaacggcacgtactggcgcagggccggcacgccccccaagtcttccgacaggtgtaggacggcctcgtggtagtcgataaacccgtcgttcgcctgggcccgctccagcagcccccccgcgagccgcagaagccgcgccaggggctcggtgtccacccgaaacatgtcggcgtacgtgtcggccgcggccccgaaggccgcgctccagtcgatgcggtgaatggctgcgagcggggggagcatggggtggcgctggttctcgggggtgtatgggttaaacgcaagggccgtctccagggcaagggtcaccgccttggcgttggttcccagcgcctgctcggcccgctttcggaagtcccgggggttgtagccgtgcgtgcccgccagcgcctgcaggcgacggagctcgaccacgtcaaactcggcaccgctttccacgcggtccagcacggcctccacgtcggcggcccagcgctcgtggctactgcgggcgcgctgggccgccatcttctctctgaggtcggcggtggcggcctcaagttcgtcggcgcggcgtcgcgtggcgccgatgacctttcccagctcctgcagggcgcgcccgctgggggagtggtccccggccgtcccttcggcgtgcaacaggcccccgaacctgccctcgtggcccgcgaggctttcccgcgcgccggtggtcgcgcgcgtcgcggcctggatcagggaggcatgctctccctccggttggttggcggcccggcgcacctggacgacaaggtcggcggcagccgaccctaaggtcgtgagctgggcgatggccccccgcgcgtccagggccaaccgagtcgccttgacgtatcccgcggcgctgtcggccatggccgctaggaaggccaggggggaggccgggtcgctggcggccgcgcccagggccgtcactgcgtcgaccaggacgcggtgcgcccgcacggccgcatccaccgtcgacgcggggtctgccgtcgcgacggcggcgctgccggcgttgatggcgttcgagacggcgtgggctatgatcggggcgtgatcggcgaagaactgcaagagaaacggagtctcgggggcgttggcgaacaggttcttcagcaccaccacgaagctgggatgcaagccggacagagccgtcgccgtgtccggagtcgggtgctccagggcatctcggtactgccccagcagcccccacatgtccgcccgcagcgccgccgtaacctccgggggcgccccccgaacggcctcggggaggtccgaccagcccgccggcagggaggcccgcagggtcgtcaggacggccggacaggcctttagccccacaaagtcagggaggggccgcaggaccccctggagtttgtgcaagaacttctcccgggcgtcgcgggccaccttcgcccgctcccgcgctccctcgagcattgcctccagggagcgcgcgcgctcccgcaaacgggcacgcgcatcgggggcgagctctgccgtcagcttggcggcatccatggcccgcgcctgccgcagcgcttcctcggccatgcgcgtggcctctggcgacagcccgccgtcgtcggggtagggcgacgcgccgggcgcaggaacaaaggccgcgtcgctgtccagctgctggcccagggccgcatctagggcgtcgaagcgccgcagctcggccagacccgagctgcggcgcgcctgctggtcgttaatgtcgcggatgctgcgcgccagctcgtccagcggcttgcgttctatcagcccttggttggcggcgtccgtcaggacggagagccaggccgccaggtcctcgggggcgtccagcgtctggccccgctgtatcagatcccgcaacaggatggccgtggggctggtcgcgatcgggggcggggcgggaatggcggcgctctgcgcgatgtcccgcgtgtgctggtcgaagacaggcagggactctagcagctggaccacgggcacgacggcggccgaagccacgtgaaaccggcggtcgttgttgtcgctggcctgcagagccttggcgctgtatacggccccccggtaaaagtactccttaaccgcgccctcgatcgcccgacgggcctgggtccgcacctcctccagccgaacctgaacggcctcggggcccagggggggtgggcgcggagccccctgcggggccgccccggccggggcgggcattacgccgaggggcccggcgtgctgtgagaccgcgtcgaccccgcgagcgagggcgtcgagggcctcgcgcatctggcgatcctccgcctccaccctaatctcttcgccacgggcaaatttggccagagcctggactctatacagaagcggttctgggtgcgtcggggtggcgggggcaaaaagggtgtccgggtgggcctgcgagcgctccagaagccactcgccgaggcgtgtatacagattggccggcggggccgcgcgaagctgcagctccaggtccgcgagttccccgtaaaaggcgtccgtctcccgaatgacatccctagccacaaggatcagcttcgccagcgccaggcgaccgatcagagagttttcgtccagcacgtgctggacgaggggcagatgggcggccacgtcggccaggctcaggcgcgtggaggccagaaagtcccccacggccgttttccggggcagcatgctcagggtaaactccagcagggcggcggccgggccggccaccccggcctgggtgtgcgtccgggccccgttctcgatgagaaaggcgaggacgcgttcaaagaaaaaaataacacagagctccagcagccccggagaagccggatacggcgaccgtaaggcgctgatggtgagccgcgaacacgcggcgacctcgcgggccagggcggcggagcacgcggtgaacttaaccgccgtggcggccacgtttgggtgggcctcgaacagctgggcaaggtctgcgcccgggggctcgggtgagcggcgagtcttcagcgcctcgagggcctgcgaggacgccggaaccgtgggcccgtcgtcctcgcccgcctcggcgaccggcggcccggccgggtcggggggtgccgaggcgaggacaggctccggaacggaggcggggaccgcggccccgacgggggttttgcctttgggggtggatttcttcttggttttggcagggggggccgagcgtttcgttttctcccccgaagtcaggtcttcgacgctggaaggcggagtccaggtgggtcggcggcgcttgggaaggccggccgagtagcgtgcccggtgccgaccaaccgggacgacgcccatctccaggacccgcatgtcgtcgtcatcttcttcggccgcctctgcggcggggggcttgggggcggagggaggcggtggtgggatcgcggagggtgggtcggcggaggggggatccgtgggtggggtacccttcagggccaccgcccatacatcgtcgggcgcccgattcgggcgcttggcctctggttttgccgacggaccggccgtcccccgggatgtctcggaggccctgtcgtcgcgacgggcccgggtcggtggcggcgactgggcggctgtgggcgggtggggccccgtgccccctaccccctcccgggggcccacgccgacgcagggctcccccaggcccgcgatctcgccccgcagggggtgcgtgatggccacgcgccgttcgctgaacgcttcgtcctgcaggtaagtctcgctggccccgtaaagatgcagagccgcggccgtcaagtccgcaggagccgcgggttccgggcccgacggcacgaaaaacaccatggctcccgcccaccgtacgtccgggcgatcgcgggtgtaatacgtcaggtatggatacatgtcccccgcccgcactttggcgatgaacgcgggggtgccctccggaaggccgtgcgggtcaaaaaggtatgcggtgtcgccgtccctgaacagccccatccctagggggccaatggttaggagcgtgtacgacagggggcgcagggcccacgggccggcgaagaacgtgtgtgcggggcattgtgtctccagcaggcccgccgcgggctccccgaagaagcccacctcgccgtatacgcgcgagaagacacagcgcagtccgccgcgcgcccctgggtactcgaggaagttggggagctcgacgatcgaacacatgcgcggcggcccagggcccgcggtcgcgcgcgtccactcgcccccctcgaccaaacaaccctcgatggcctccgcggacagaacgtcgcgagggcccacatcaaatatgaggctgagaaaggacagcgacgagcgcatgcacgataccgacccccccggctccaggtcgggcgcgaactggttccgagcaccggtgaccacgatgtcgcgatcccccccgcgttccatcgtggagtgcggtggggtgcccgcgatcatatgtgccctactggccagagacccggcctgtttatggaccggacccccggggttagtgttgtttccgccacccatgcccccgtaccatggccccggttcccctgattaggctacgagtcgcggtgatcgcttcccaaaaaccgagctgcgtttgtctgtcttgatctttcccccccccgcccgcccgcccgcccgcacaccataacaccgagaacaacacacgggggtgggcgtaacataataaagctttattggtaactagttaacggcaagtccgtgggtggcgcgacggtgtcctccgggctcatctcgtcgtcctcgacgggggtgttggaatgaggcgccccctcgcggtccgcctggcgtgggccgtgcccataggcctccggcttctgtgcgtccatgggcataggcgcggggagactgtttccggcgtcgcggacctccaggtccctgggagactccggtccggctaacggacgaaacgcggaagcgcgaaacacgccgtcggtgacccgcaggagctcgttcatcagtaaccaatccatactcagcgtaacggccagcccctggcgagacagatccacggagtccggaaccgcggtcgtctggcccagggggccgaggctgtagtccccccaggcccctaggtcgcgacggctcgtaagcacgacgcggtcggccgcggggctttgcgggggggcgtcctcgggcgcatgcgccattacctctcggatggccgcggcgcgctggtcggccgagctgaccaagggcgccacgaccacggcgcgctccgtctgcaggcccttccacgtgtcgtggagttcctggacaaactcggccacgggctcgggtcccgcggccgcgcgcgcggcttgatagcaggccgagagacgccgccagcgcgctagaaactgacccatgaagcaaaacccggggacctggtctcccgacagcagcttcgacgcccgggcgtgaatgccggacacgacggacagaaacccgtgaatttcgcgccggaccacggccagcacgttgtcctcgtgcgacacctgggccgccagctcgtcgcacacccccaggtgcgccgtggtttcggtgatgacggaacgcaggctcgcgagggacgcgaccagcgcgcgcttggcgtcgtgatacatgctgcagtactgactcaccgcgtcccccatggcctcggggggccagggccccaggcggtcgggcgtgtccccgaccaccgcatacaggcggcgcccgtcgctctcgaaccgacactcgaaaaaggcggagagcgtgcgcatgtgcagccgcagcagcacgatggcgtcctccagttggcgaatcagggggtctgcgcgctcggcgaggtcctgcagcaccccccgggcggccagggcgtacatgctaatcaacaggaggctggtgcccacctcggggggcggggggggctgcagctggaccaggggccgcagctgctcgacggcacccctggagatcacgtacagctcccggagcagctgctctatgttgtcggccatctgcatagtggggccgaggccgccccgggcggccggttcgaggagggtaatcagcgcgcccagtttggtgcgatggccctcgaccgtggggagatagcccagcccaaagtcccgggcccaggccaacacacgcagggcgaactcgaccgggcgtggaaggtaggccgcgctacacgtggccctcaacgcgtccccgaccaccagggccagaacgtaggggacgaagcccgggtcggcgaggacgttggggtgaatgccctcgagggcggggaagcggatctgggtcgccgcggccaggtggacagagggggcgtggctgggctgcccgacggggagaagcgcggacagcggcgtggccggggtggtgggggtgatgtcccagtgggtctgaccatacacgtcgatccagatgagcgccgtctcgcggagaaggctgggttgaccggaactaaagcggcgctcggccgtctcaaactcccccacgagcgcccgccgcaggctcgccagatgttccgtcggcacggccggacccatgatacgcgccagcgtctggctcagaacgccccccgacaggccgaccgcctcgcagagccgcccgtgcgtgtgctcgctggcgccctggacccgcctgaaagtttttacgtagttggcatagtacccgtattcccgcgccagaccaaacacgttcgaccccgcgagggcaatgcacccaaagagctgctggacttcgccgagtccgtggccggcgggcgtccgcgcggggacgcccgccgccagaaacccctccagggccgaaaggtagtgcgtgcagtgcgagggcgtgaacccagcgtcgatcagggtgttgatcaccacggagggcgaattggtattctggatcaacgtccacgtctgctgcagcagagccagcagccgctgctgggcgccggcggagggctgctccccgagctgcagcaggctggagacggcaggctggaagactgccagtgccgacgaactcaggaacggcacgtcgggatcaaacacggccacgtccgtccgcacgcgcgccattagcgtccccgggggcgcacaggccgagcgcgggctgacgcggctgagggccgtcgacacgcgcacctcctcgcggctgcgaaccatcttgttggcctccagtggcggaatcattatggccgggtcgatctcccgcacggtgtgctgaaactgcgccaacaggggcggcgggaccacagccccccgctcgggggtcgtcaggtactcgtccaccagggccaacgtaaagagggcccgtgtgaggggagtgagggtcgcgtcgtctatgcgctggaggtgcgccgagaacagcgtcacccgattactcaccagggccaagaaccggaggccctcttgcacgaacggggcggggaagagcaggctgtacgccggggtggtaaggttcgcgctgggctgccccaacgggaccggcgccatcttgagcgacgtctccccaagggcctcgatggaggtccgcgggctcatggccaagcagctcttggtgacggtttgccagcggtctatccactccacggcgcactggcggacgcggaccggccccagggccgccgcggtgcgcaggccggcggaatccagcgcatgggacgtgtcggagccggtgaccgcgaggatggtgtccttgatgacctccatctcccggaaggcctggtcgggggcctcggggagagccaccaccaagcggtgtacgagcaacccggggaggttctcggccaagagcgccgtctccggaagcccgtgggcccggtggagcgcgcacaggtgttccagcagcggccgccagcatgcccgcgcgtctgccggggcgatggccgttcccgacaacagaaacgccgccatggcggcgcgcagcttggccgtggccagaaacgccgggtcgtccgccccgtttgccgtctcggccgtgggggttggcggttggcgaaggccggctaggctcgccaataggcgctgcataggtccgtccgagggcggaccggcgggtgaggtcgtgacgacgggggcctcggacgggagaccgcggtctgccatgacgcccggctcgcgtgggtgggggacagcgtagaccaacgacgagaccgggcgggaatgactgtcgtgcgctgtagggagcggcgaattatcgatcccctgcggccctccaggaaccccgcaggcgttgcgagtaccccgcgtcttcgcggggtgttatacggccacttaagtcccggcatcccgttcgcggacccaggcccgggggattgtccggatgtgcgggcagcccggacggcgtgggttgcggactttctgcggggcggcccaaatggccctttaaacgtgtgtatacggacgcgccgggccagtcggccaacacaacccaccggaggcggtagccgcgtttggctgtggggtgggtggttccgccttgcgtgagtgtcctttcgacccccccctcccccgggtcttgctaggtcgcgatctgtggtcgcaatgaagaccaatccgctacccgcaaccccttccgtgtggggcgggagtaccgtggaactcccccccaccacacgcgataccgcggggcagggcctgcttcggtgcgtcctgcgccccccgatctctcgccgcgacggcccagtgctccccagggggtcgggaccccggagggcggccagcacgctgtggttgcttggcctggacggcacagacgcgccccctggggcgctgacccccaacgacgataccgaacaggccctggacaagatcctgcggggcaccatgcgcgggggggcggccctgatcggctccccgcgccatcatctaacccgccaagtgatcctgacggatctgtgccaacccaacgcggatcgtgccgggacgctgcttctggcgctgcggcaccccgccgacctgcctcacctggcccaccagcgcgccccgccaggccggcagaccgagcggctgggcgaggcctggggccagctgatggaggcgaccgccctggggtcggggcgagccgagagcgggtgcacgcgcgcgggcctcgtgtcgtttaacttcctggtggcggcgtgtgccgcctcgtacgacgcgcgcgacgccgccgatgcggtacgggcccacgtcacggccaactaccgcgggacgcgggtgggggcgcgcctggatcgtttttccgagtgtctgcgcgccatggttcacacgcacgtcttcccccacgaggtcatgcggtttttcggggggctggtgtcgtgggtcacccaggacgagctagcgagcgtcaccgccgtgtgcgccgggccccaggaggcggcgcacaccggccacccgggccggccccgctcggccgtgatcctcccggcgtgtgcgttcgtggacctggacgccgagctggggctggggggcccgggcgcggcgtttctgtacctggtattcacttaccgccagcgccgggaccaggagctgtgttgtgtgtacgtgatcaagagccagctccccccgcgcgggttggagccggccctggagcggctgtttgggcgcctccggatcaccaacacgattcacggcaccgaggacatgacgcccccggccccaaaccgaaaccccgacttccccctcgcgggcctggccgccaatccccaaaccccgcgttgctcggctggccaggtcacgaacccccagttcgccgacaggctgtaccgctggcagccggaccttcgggggcgccccaccgcacgcacctgtacgtacgccgcctttgcagagctcggcatgatgcccgaggatagtccccgctgcctgcaccgcaccgagcgctttggggcggtcagcgtccccgttgttattctggaaggcgtggtgtggcgccccggcgagtggcgggcatgcgcgtgagcgtagcaaacgccccgcccacacaacgctccgcccccaaccccttccccgctgtcactcgtggttcgttgacccggacgtccgccaaataaagccactgaaacccgaaacgcgagtgttgtaacgtcctttgggcgggaggaagccacaaaatgcaaatgggatacatggaaggaacacacccccgtgactcaggacatcggcgtgtccttttgggtttcactgaaactggcccgcgccccacccctgcgcgatgtggataaaaagccagcgcgggtggtttagggtaccacaggtgggtgctttggaaacttgtcggtcgccgtgctcctgtgagcttgcgtccctccccggtttcctttgcgctcccgccttccggacctgctctcgcctatcttctttggctgtcggtgcgattcgtcaggcagcggccttgtcgaatctcgaccccaccactcgccggacccgccgacgtcccctctggagcccgccgaaacccgccgcgtctgttgaaatggccagccgcccagccgcatcctctcccgtcgaagcgcgggccccggttgggggacaggaggccggcggccccagcgcagccacccagggggaggccgccggggcccctctcgcccacggccaccacgtgtactgccagcgagtcaatggcgtgatggtgctttccgacaagacgcccgggtccgcgtcctaccgcatcagcgatagcaactttgtccaatgtggttccaactgcaccatgattatcgacggagacgtggtgcgcgggcgcccccaggacccgggggccgcggcatcccccgctcccttcgttgcggtgacaaacatcggagccggcagcgacggcgggaccgccgtcgttgcattcgggggaaccccacgtcgctcggcggggacgtctaccggtacccagacggccgacgtcccagccgaggcccttgggggcccccctcctcctccccgcttcaccctgggtggcggctgttgctcctgtcgcgacacacggcgccgctctgcggtattcgggggggagggggatcccgtcggccccgcggagttcgtctcggacgaccggtcgtccgattccgactcggatgactcggaggacaccgactcggagacgctgtcacacgcctcctcggacgtgtccggcggggccacgtacgacgacgcccttgactccgattcgtcatcggatgactccctgcagatagatggccccgtgtgtcgcccgtggagcaatgacaccgcgcccctggatgtttgccccgggacccccggcccgggcgccgacgccggtggtccctcagcggtagacccacacgcgccgacgacaggggccggcgctggtcttgcggccgatcccgccgtggcccgggacgacgcggaggggctttcggacccccggccacgtctgggaacgggcacggcctaccccgtccccctggaactcacgcccgagaacgcggaggccgtggcgcgctttctgggagatgccgtgaaccgcgaacccgcgctcatgctggagtacttttgccggtgcgcccgcgaggaaaccaagcgtgtcccccccaggacattctgcagcccccctcgcctcacggaggacgactttgggcttctcaactacgcgctcgtggagatgcagcgcctgtgtctggacgttcctccggtcccgccgaacgcatacatgccctattatctcagggagtatgtgacgcggctggtcaacgggttcaagccgctggtgagccggtccgctcgcctttaccgcatcctgggggttctggtgcacctgcggatccggacccgggaggcctcctttgaggagtggctgcgatccaaggaagtggccctggactttggcctgacggaaaggcttcgcgagcacgaagcccagctggtgatcctggcccaggctctggaccattacgactgtctgatccacagcacaccgcacacgctggtcgagcgggggctgcaatcggccctgaagtatgaggagttttacctaaagcgctttggcgggcactacatggagtccgtcttccagatgtacacccgcatcgccggctttttggcctgccgggccacgcgcggcatgcgccacatcgccctggggcgagaggggtcgtggtgggaaatgttcaagttctttttccaccgcctctacgaccaccagatcgtaccgtcgacccccgccatgctgaacctggggacccgcaactactacacctccagctgctacctggtaaacccccaggccaccacaaacaaggcgaccctgcgggccatcaccagcaacgtcagtgccatcctcgcccgcaacgggggcatcgggctatgcgtgcaggcgtttaacgactccggccccgggaccgccagcgtcatgcccgccctcaaggtcctcgactcgctggtggcggcgcacaacaaagagagcgcgcgtccgaccggcgcgtgcgtgtacctggagccgtggcacaccgacgtgcgggccgtgctccggatgaagggggtcctcgccggcgaagaggcccagcgctgcgacaatatcttcagcgccctctggatgccagacctgtttttcaagcgcctgattcgccacctggacggcgagaagaacgtcacatggaccctgttcgaccgggacaccagcatgtcgctcgccgactttcacggggaggagttcgagaagctctaccagcacctcgaggtcatggggttcggcgagcagatacccatccaggagctggcctatggcattgtgcgcagtgcggccacgaccgggagccccttcgtcatgttcaaagacgcggtgaaccgccactacatctacgacacccagggggcggccatcgccggctccaacctctgcaccgagatcgtccatccggcctccaagcgatccagtggggtctgcaatctgggaagcgtgaatctggcccgatgcgtctccaggcagacgtttgactttgggcggctccgcgacgccgtgcaggcgtgcgtgctgatggtgaacatcatgatcgacagcacgctacaacccacgccccagtgcacccgcggcaacgacaacctgcggtccatgggaatcggcatgcagggcctgcacacggcctgcctgaagctggggctggatctggagtctgccgaatttcaggacctgaacaaacacatcgccgaggtgatgctgctgtcggcgatgaagaccagcaacgcgctgtgcgttcgcggggcccgtcccttcaaccactttaagcgcagcatgtatcgcgccggccgctttcactgggagcgctttccggacgcccggccgcggtacgagggcgagtgggagatgctacgccagagcatgatgaaacacggcctgcgcaacagccagtttgtcgcgctgatgcccaccgccgcctcggcgcagatctcggacgtcagcgagggctttgcccccctgttcaccaacctgtttagcaaggtgacccgggacggcgagacgctgcgccccaacacgctcctgctaaaggaactggaacgcacgtttagcgggaagcgcctcctggaggtgatggacagtctcgacgccaagcagtggtccgtggcgcaggcgctcccgtgcctggagcccacccaccccctccggcgattcaagaccgcgtttgactacgaccagaagttgctgatcgacctgtgtgcggaccgcgccccctacgtcgaccatagccaatccatgaccctgtatgtcacggagaaggcggacgggaccctcccagcctccaccctggtccgccttctggtccacgcatataagcgcggactaaaaacagggatgtactactgcaaggttcgcaaggcgaccaacagcggggtctttggcggcgacgacaacattgtctgcacgagctgcgcgctgtgaccgacaaaccccctccgcgccaggcccgccgccactgtcgtcgccgtcccacgcgctcccccgctgccatggattccgcggccccagccctctcccccgctctgacggcccatacgggccagagcgcgccggcggacctggcgatccagattccaaagtgccccgaccccgagaggtacttctacacctcccagtgtcccgacattaaccacctgcgctccctcagcatccttaaccgctggctggaaaccgagcttgttttcgtgggggacgaggaggacgtctccaagctttccgagggcgagctcagcttttaccgcttcctcttcgctttcctgtcggccgccgacgacctggttacggaaaacctgggcggcctctccggcctgtttgagcagaaggacattctccactactacgtggagcaggaatgcatcgaagtcgtacactcgcgcgtgtacaacatcatccagctggtgctttttcacaacaacgaccaggcgcgccgcgagtacgtggccggcaccatcaaccacccggccatccgcgccaaggtggactggttggaagcgcgggtgcgggaatgcgcctccgttccggaaaagttcattctcatgatcctcatcgagggcatcttttttgccgcctcgtttgccgccatcgcctaccttcgcaccaacaaccttctgcgggtcacctgccagtcaaacgacctcatcagccgggacgaggccgtgcacacgacggcctcgtgttacatctacaacaactacctcggcgggcacgccaagcccccgcccgaccgcgtgtacgggctgttccgccaggcggtcgagatcgagatcggatttatccgatcccaggcgccgacggacagccatatcctgagcccggcggcgctggcggccatcgaaaactacgtgcgattcagcgcggatcgcctgttgggccttatccacatgaagccactgttttccgccccaccccccgacgccagctttccgctgagcctcatgtccaccgacaaacacaccaattttttcgagtgtcgcagcacctcctacgccggggcggtcgtcaacgatctgtgagggtcgcggcgcgcttctacccgtgtttgcccataataaacctctgaaccaaactttgggtctcattgtgattcttgtcagggacgcgggggtgggagaggataaaaggcggcgcaaaaagcagtaaccaggtccggccagattctgagggcataggataccataattttattggtgggtcgtttgttcggggacaagcgcgctcgtctgacgtttgggctactcgtcccagaatttggccaggacgtccttgtagaacgcgggtgggggggcctgggtccgcagctgctccagaaacctgtcggcgatatcaggggccgtgatatgccgggtcacgatagatcgcgccaggttttcgtcgcggatgtcctggtagataggcaggcgtttcagaagagtccacggcccccgctccttggggccgataagcgatatgacgtacttaatgtagcggtgttccaccagctcggtgatggtcatgggatcggggagccagtccagggactctggggcgtcgtggatgacgtggcgtcgccggctggccacataactgcggtgctcttccagcagctgcgcgttcgggacctggacgagctcgggcggggtgagtatctccgaggaggacgacctggggccggggtggcccccggtaacgtcccggggatccagggggaggtcctcgtcgtcttcgtatccgccggcgatctgttgggttagaatttcggtccacgagacgcgcgtctcggtgccgccggtggccggcggcagagggggcctggtttccgtggagcgcgagctggtgtgttcccggcggatggcccgccgggtctgagagcgactcgggggggtccagtgacattcgcgcagcacatcctccacggaggcgtaggtgttattgggatggaggtcggtgtggcagcggacaaagagggccaggaactgggggtagctcatcttaaagtacttcagtatatcgcgacagttgatcgtgggaatgtagcaggcgctaatatccaacacaatatcgcagcccatcaacaggaggtcagtgtccgtggtgtacacgtacgcgaccgtgttggtgtgatagaggttggcgcaggcatcgtccgcctccagctgacccgagttaatgtaggcgtaccccagggcccggagaacgcgaatacagaacagatgcgccagacgcagggccggcttcgagggcgcggcggacggcagcgcggctccggacccggccgtcccccgggtccccgaggccagagaggtgccgcgtcggcgcatgttggaaaaggcagagctgggtctggagtcggtgatgggggaaggcggtggagaggcgtccacgtcactggcctcctcgtccgtccggcactgggccgtcgtgcgggccaggatggccttggctccaaacacaaccggctccatacaattgaccccgcgatcggtaacgaagatggggaaaagggacttttgggtaaacacctttaataagcgacagaggcagtgtagcgtaatggcctcgcggtcgtaactggggtatcggcgctgatatttgaccaccaacgtgtacatgacgttccacaggtccacggcaatgggggtgaagtacccggccggggccccaaggccccggcgcttgaccagatggtgtgtgtgggcaaacttcatcatcccgaacaaacccatgtcaggtcgattgtaactgcggatcggcctaactaaggcgtggttggtgcgacggtccgggacacccgagcctgtctctctgtgtatggtgacccagacaacaacaccgacacaagaggacaataatccgttaggggacgctctttataatttcgatggcccaactccacgcggattggtgcagcaccctgcatgcgccggtgcgggccaaccttccccccgctcattgcctcttccaaaagggtgtggcctaacgagctgggggcgtatttaatcaggctagcgcggcgggcctgccgtagtttctggctcggtgagcgacggtccggttgcttgggtcccctggctgccatcaaaaccccaccctcgcagcggcatacgccccctccgcgtcccgcacccgagaccccggcccggctgccctcaccaccgaagcccacctcgtcactgtggggtgttcccagcccgcgttgggatgacggattcccctggcggtgtggcccccgcctcccacgtggaggacgcgtcggacgcgtccctcgggcagccggaggagggggcgccctgccaggtggtcctgcagggcgccgagcttaatggaatcctacaggcgtttgccccgctgcgcacgagccttctggactcgcttctggttatgggagaccggggcatccttatccataacacgatctttggggagcaggtgttcctgcccctggaacactcgcaattcagtcggtatcgctggcgcggacccacggcggcgttcctgtctctcgtggaccagaagcgctccctcctgagcgtgtttcgcgccaaccagtacccggacctacgtcgggtggagttggcgatcacgggccaggccccgtttcgcacgctggttcagcgcatatggacgacgacgtccgacggcgaggccgttgagctagccagcgagacgctgatgaagcgcgaactgacgagctttgtggtgctggttccccagggaacccccgacgttcagttgcgcctgacgaggccgcagctcaccaaggtccttaacgcgaccggggccgatagtgccacgcccaccacgttcgagctcggggttaacggcaaattttccgtgttcaccacgagtacctgcgtcacatttgctgcccgcgaggagggcgtgtcgtccagcaccagcacccaggtccagatcctgtccaacgcgctcaccaaggcgggccaggcggccgccaacgccaagacggtgtacggggaaaatacccatcgtaccttctctgtggtcgtcgacgattgcagcatgcgggcggtgctccggcgactgcaggtcgccgggggcaccctcaagttcttcctcacgacccccgtccccagtctgtgcgtcaccgccaccggtcccaacgcggtatcggcggtatttctcctgaaaccccagaagatttgcctggactggctgggtcatagccaggggtctccttccgccgggagctcggcctcccgggcctctgggagcgagccaacagacagccaggactccgcgtcggacgcggtcagccacggcgatccggaagacctcgatggcgctgcccgggcgggagaggcgggggcctcgtacgcctgtccgatgccgtcgtcgaccacgcgggtcactcccacgaccaagcgggggcgctcggggggcgaggatgcgcacgcggacacggccctaaagaaacctaagacggggtcgcccaccgcacccccgcccgcagatccagtccccctggacacggaggacgactccgatgcggcggacgggacggcggcccgtcccgccgctccagacgcccgaagcggaagccgttacgcgtgttactttcgcgacctcccgaccggagaagcaagccccggcgccttctccgccttccgggggggcccccaaaccccgtctggttttggattcccctgacggggcggggccttagcggccgcccaaccctcgcaacatcccggggttaatgtaaataaacttggtattgcccaacactctcccgcgtgtcgcgtgtggttcatgtgtgtgcctggcgcccccaccctcgggttcgtgtatttcctttccctgtccttataaaagccgtatgtggggcgctgacggaaccaccccgcgtgccatcacggccaaggcgcgggatgctccgcaacgacagccaccgggccgcgtccccggaggacggccagggacgggtcgacgacggacggccacacctcgcgtgcgtgggggccctggcgcgggggttcatgcatatctggcttcaggccgccacgctgggttttgcgggatcggtcgttatgtcgcgcgggccgtacgcgaatgccgcgtctggggcgttcgccgtcgggtgcgccgtgctgggctttatgcgcgcgccccctcccctcgcgcggcccaccgcgcggatatacgcctggctcaaactggcggccggtggagcggcccttgttctgtggagtctcggggagcccggcacgcagccgggggccctggccccgggcccggccacccagtgcctggcgctgggcgccgcctatgcggcgctcctggtgctcgccgatgacgtctatccgctctttctcctcgccccggggcccctgttcgtcggcaccctggggatggtcgtcggcgggctgacgatcggaggcagcgcgcgctactggtggatcggtgggcccgccgcggccgccctggccgcggcggtgttggcgggcccgggggcgaccaccgccagggactgcttctccagggcgtgccccgaccaccgccgcgtctgcgtcatcgtcgcaggcgagtctgtttcccgccgccccccggaggacccagagcgacccggggacccagggccaccgtcccccccgacaccccaacgatcccaggggccgccggccgatgaggtcgcaccggccggggtagcgcggcccgaaaacgtctgggtgcccgtggtcacctttctgggggctggcgcgctcgccgtcaagacggtgcgagaacatgcccggggaacgccgggcccgggcctgccgctgtggccccaggtgtttctcggaggccatgtggcggtggccctgacggagctgtgtcaggcgcttgcgccctgggaccttacggacccgctgctgtttgttcacgccggactgcaggtcatcaacctcgggttggtgtttcggttttccgaggttgtcgtgtatgcggcgctagggggtgccgtgtggatttcgttggcgcaggtgctggggctccggcgtcgcctgcacaggaaggaccccggggacggggcccggttggcggcgacgcttcggggcctcttcttctccgtgtacgcgctggggtttggggtgggggcgctgctgtgccctccggggtcaacgggcgggcggtcgggcgattgatatatttttcaataaaaggcattagtcccgaagaccgccggtgtgtgatgatttcgccataacacccaaaccccggatggggcccgggtataaattccggaaggggacacgggctaccttcactaccgagggcgcttggtcgggaggccgcatcgaacgcacacccccatccggtggtccgtgtggaggtcgtttttcagtgcccggtctcgctttgccgggaacgctagccgatccctcgcgagggggaggcgtcgggcatggccccggggcgggtgggccttgccgtggtcctgtggagcctggtgtggctcggggcgggggtgtccgggggctcggaaactgcctccaccgggcccacgatcaccgcgggagcggtgacgaacgcgagcgaggcccccacatcggggtcccccgggtcagccgccagcccggaggtcacccccacatcgaccccaaaccccaacaatgtcacacaaaaccaaaccacccccaccgagccggccagccccccaacaacccccaagcccacctccacacccaaaagcccccccacgtccacccccgaccccaaacccaagaacaacaccacccccgccaagtcggaccgccccactaaaccccccgggcccgtgtggtgcgaccgccgcgatttattggcccggtacggctcgcgggtgcagatccgatgccggtttcggaattccacccgcatggagttccgcctccagatatggcgttactccatgggtccgtcccccccaatcgctccggctcccgacctagaggaggtcctgacgaacatcaccgccccacccgggggactcctggtgtacgacagcgcccccaacctaacggacccccacgtgctctgggcggagggggccggcccgggcgccgaccctccgttgtattctgtcaccgggccgctgccgacccagcggctgattatcggcgaggtgacgcccgcgacccagggaatgtattacttggcctggggccggatggacagcccgcacgagtacgggacgtgggtgcgcgtccgcatgttccgccccccgtctctgaccctccagccccacgcggtgatggagggtcagccgttcaaggcgacgtgcacggccgccgcctactacccgcgtaaccccgtggagtttgtctggttcgaggacgaccaccaggtgtttaacccgggccagatcgacacgcagacgcacgagcaccccgacgggttcaccacagtctctaccgtgacctccgaggctgtcggcggccaggtccccccgcggaccttcacctgccagatgacgtggcaccgcgactccgtgacgttctcgcgacgcaatgccaccgggctggccctggtgctgccgcggccaaccatcaccatggaatttggggtccggcatgtggtctgcacggccggctgcgtccccgagggcgtgacgtttgcctggttcctgggggacgacccctcaccggcggctaagtcggccgttacggcccaggagtcgtgcgaccgccccgggctggctacggtccggtccaccctgcccatttcgtacgactacagcgagtacatctgtcggttgaccggatatccggccgggattcccgttctagagcaccacggcagtcaccagcccccacccagggaccccaccgagcggcaggtgatcgaggcgatcgagtgggtggggattggaatcggggttctcgcggcgggggtcctggtcgtaacggcaatcgtgtacgtcgtccgcacatcacagtcgcggcagcgtcatcggcggtaacgcgagacccccccgttacctttttaatatctatatagtttggtccccctctatcccgcccaccgctgggcgctataaagccgccaccctctcttccctcaggtcatccttggtcgatcccgaacgacacacggcgtggagcaaaacgcctccccctgagccgctttcctaccagcgcaacggcatgcctctgcgggcatcggaacacgcctaccggcccctgggccccgggacaccccccatgcgggctcggctccccgccgcggcctgggttggcgtcgggaccatcatcgggggagttgtgatcattgccgcgttggtcctcgtgccctcgcgggcctcgtgggcactttccccatgcgacagcggatggcacgagttcaacctcgggtgcatatcctgggatccgacccccatggagcacgagcaggcggtcggcggctgtagcgccccggcgaccctgatcccccgcgcggctgccaaacagctggccgccgtcgcacgcgtccagtcggcaagatcctcgggctactggtgggtgagcggagacggcattcgggcctgcctgcggctcgtcgacggcgtcggcggtattgaccagttttgcgaggagcccgcccttcgcatatgctactatccccgcagtcccgggggctttgttcagtttgtaacttcgacccgcaacgcgctggggctgccgtgaggcgcgtgtactgcggtctgtctcgtctcctcttctccccttccctccccctccgcatcccaggatcacaccggccaacgagggttggggggtccggcacggacccaaaataataaacacacaatcacgtgcgataaaaagaacacgcggtcccctgtggtgtttttggttatttttattaaatctcgtcgtcaaacagggggaaaggggcgtggtctagcgacggcagcacgggtggaggcgttcaccggctccggcgtccttcgcgtttaagcttggtcaggagggcgctcagggcggcgacgttggtcgggccgtcgttggtcagggcgttggctcgatggcgggcgaggacgggcgaggggctcaacggcgggggcgggggcccggtgcggcccgggggggaaaatagggcggatcccccccagtcgtacaggggattttccgcctcaatgtacggggaggccggcgctgcattcgccgtgttcgcgcagacgttttcgtagacccgcatccatggtatttcctcgtagacacgccccccgtcctcgctcacagtctcgtatattgactcgtcgtcctcgtagggggcgtgccgttcgcgggccgaggcggcgtgggtggctttgcggcgggcgtcgtcgtcgtcgtcggccgtcagatacgtggcttccatctggtcgggttctccctccggggcgggtccccacccccgtggccgatcgaggctccccagagacgcgcgccggacgaggagggggcacgtcgccgccggcggtcgcctgtcgggtcccgcgacgttacgggccgggaggcgcgggggcacctcccccatgtgcgtgtaatacgtggccggctgtgcggccgcagcggggggctcggcgaccgggtcgtccgcatccggaagcgggggcgccgcgccgtccgcgcggcgcctccggaaccgccgggtggccgcgggggtcgagtgtaggcgaggtcgggggaggggcgggggctcgttgtcgcgccgcgcccgctgaatcttttcccgacaggtcccaccccccgcgcgatgcccccccgggccgcgggccatgtcgtccgggggaggccccgcggaccacgtcgtccggcgagacgccacgagccgcaggatggactcgtagtggagcgacggcgccccgctgcggagcagatccgcggccagggcggccccgaaccaagccttgatgctcaactccatccgggcccagctgggggcggtcatcgtggggaacaggggggcggtggtccgacagaaacgctcctggctgtccaccgcggcccgcagatactcgttgttcaggctgtcggtggcccagacgccgtacccggtgagggtcgcgttgatgatatactgggcgtggtgatggacgatcgacagaacctccaccgtggatacgacggtatccacggtcccgtacgtaccgccgctccgcttgccggtctgccacaggttggctaggcgcgtcaggtggcccaggacgtcgctgaccgccgccctgagcgccatgcactgcatggagccggtcgtgccgctgggaccccggtccagatggcgcgcgaacgtttccgcgggcgcctccgggctgccgccgagcgggaggaaccggcgattggagggactcagccggtggcatacgtgcttgtctgtcgtccacagcatccaggacgcccaccggtacagcacggagacgtaggccaggagctcgttgagccgcagtgcggtgtcggtgctggggcggcttgggtccgccgggcgcataaagaacatgtactgctgaatccgatggagggcgtcgcgcaggccggccacggtggcggcgtacttggccgccgcggccccgctcttgaacggggtgcgcgccagcagctttggcgccagggtgggccgcagcagcacgtgaaggctggggtcgcagtcgcccacggggtcctcggggacgtccaggccgctgggcaccaccgtctgcaggtacttccagtactgcgtgaggatggcgcggctcaactggccgccggtgagctccacctcgcccagcgcctgggtggcggccgaagcgtagtgccggatgtactcgtagtgcgggtcgctggcgagcccgtccacgatcaaactctcgggaaccgtgttgtgttgccgcgcggccaaccggacgctgcgatcggtgcaggtcagaaacgccggctgcgcgtcgtcggagcgctgccgcaaggcgcccacggccgcgctaaggagcccctccggggtggggagcagacacccgccgaagatgcgccgctcgggaacgcccgcgttgtcgccgcggatcaggttggcaggcgtcaggcaccgcgccagccgcagggagctcgcgccgcgcgtccggcgctgcatggtgacgcccgttcggtcgggacccgccggtcggagttatgccgcgtccagggccatcggggcgctttttatcgggaggagcttatgggcgtggcgggcctcccagcccggtcgcgcgcctccccgacacgtgcgcccgcagggcggcggccccctcgtctcccatcagcagtttcctaaactgggacatgatgtccaccacgcggacccgcgggcccaacacggacccgccgcttacgggggcgggggggaagggctccaggtccttgagaagaaaggcggggtctgccgtcccggacacgggggcccggggcgctgaggaggcggggcgcagatccacgtgctccgcggccgcgcggacgtccgcccagaacttggcgggggtggtgcgcgcgtacaggggctgggtcgctcggaggacgcacgcgtagcgcaggggggtgtacgtgcccacctcgggggccgtgaatcccccgtcaaacgcggccagtgtcacgcacgccaccacggtgtcggcaaagcccagcagccgctgcaggacgagcccggcggccagaatggcgcgcgtggccgccgcgtcgtcccggcgccggtgcgcgtccccgcacgcccgggcgtactttaaggtcacggtcgccagggccgtgtgcagcgcgtacaccgcagcgcccagcacggcgttgagcccgctgttggcgagcagccggcgcgctgcggtgtcgcccagcgcctcgtgctcggcccccacgaccgcggggcttcccaggggcagggcgcgaaacagctcctcccgcgccacgtccgcaaaggcggggtggtgcacgtgcgggtgcaggcgcgcccccacgaccaccgagagccactggaccgtctgctccgccatcaccgccagcacatccagcacgcgccccaggaaggcggcctcccgcgtcaaaacgcaccggacggcgtcgggattgaagcgggcgagcagggccccggtggccaggtacgtcatgcggccggcatagcgggcggccacgcgacagtcgcggtccagcagcgcgcgcaccccgggccagtacagcagggaccccagcgagctgcgaaacaccgcggcgtcggggccggattggggggacactaacccccccgcgctcagtaacggcacggccgcggccccgacgggacgcaacgccgtgaggctcgcgaactgccgcctcagctcggcagccctgtcgtccaggtccgacccgcgcgcctctgcgtgaaggcgcgtcccgcacacccacccgttgatggccagccgcacgacggcatccgccaaaaagctcatcgcctgggcggggctggtttttgttcgacgatccgtcaggtcaagaatcccatcgcccgtgatataccaggccaacgcctcgccctgctgcagggtttggcggaaaaacaccgcggggttgtcgggggaggcgaagtgcatgacccccacgcgcgataacccgaacgcgctatccggacacgggtaaaacccggccggatgccccagggctagggcggagcgcacggactcgtcccacacggcaacctgaggggccagtcgatccaacgggaatgccgcccggagctccgggcccggcacgcgtccctccagaacctccaccttgggcggggaacgggccccgccgccgtcctccggcccgacgtcttccgggtagtcgtcctcctcgtactgcagctcctctaggaacagcggcgacggcgccacccgcgaaccgccgacccgccccaaaatagcccgcgcgtcgacgggacccaggtatcccccctgccgggcctgcggaggaccgcggggaacctcatcatcatcgtccaggcgaccgcgcaccgactggctacgggccgcatcgggcccggggcgctgccgggacgctcggcgatgggatgtgggcggggcttccgacgcgcgccgtcgtcgggctcgcgggccttcccgtcgacggcgcacgggcggctcgtcgcccgccatctcctccagagcctctagctcgctgtcgtcatccccgcggaacaccgcacgcaggtaccccatgaaccccaccccatcgcccgctggctcgtccgccacgggcgaggcgcgggggcgggtggatgcgcgcctcctacgccccgcgggttcgcgagccgacatggtggcgatagacgcgggttatcggatgtccgctaccccccaaaaaagaaaaagaccccacagcgcggatggaggccggggtaggtgccgccggaccccctcgcgatgggaatggacgggagcgacggggccggcgcaaaaaacgcagtatctcccgcgaaggctacccgccgccccagcccccggccaaatgcggaaacggtcccgcgctctcgcctttatacgcgggccgccctgcgacacaatcacccgtccgtggtttcgaatctacacgacaggcccgcagacgcggctaacacacacgccggcaacccagaccccagtgggttggttgcgcggtcccgtctcctggctagttcttttccccaccaccaaataatcagacgacaaccgcaggtttttgtaatgtatgtgctcgtgtttattgtggatacgaaccggggacgggaggggaaaacccagacgggggatgcgggtccggtcgcgccccctacccaccgtactcgtcaattccaagggcatcggtaaacatctgctcaaactcgaagtcggccatatccagagcgccgtagggggcggagtcgtggggggtaaatcccggacccggggaatccccgtcccccaacatgtccagatcgaaatcgtctagcgcgtcggcatgcgccatcgccacgtcctcgccgtctaagtggagctcgtcccccaggctgacatcggtcgggggggccgtcgacagtctgcgcgtgtgtcccgcggggagaaaggacaggcgcggagccgccagccccgcctcttcgggggcgtcgtcgtccgggagatcgagcaggccctcgatggtagacccgtaattgtttttcgtacgcgcgcggctgtacgcgtgttcccgcatgaccgcctcggagggcgaggtcgtgaagctggaatacgagtccaacttcgcccgaatcaacaccataaagtacccagaggcgcgggcctggttgccatgcagggtgggaggggtcgtcaacggcgcccctggctcctccgtagccgcgctgcgcaccagcgggaggttaaggtgctcgcgaatgtggtttagctcccgcagccggcgggcctcgattggcactccccggacggtgagcgctccgttgacgaacatgaagggctggaacagacccgccaactgacgccagctctccaggtcgcaacagaggcagtcaaacaggtcgggccgcatcatctgctcggcgtacgcggcccataggatctcgcgggtcaaaaatagatacaaatgcaaaaacagaacacgcgccagacgagcggtctctcggtagtacctgtccgtgatcgtggcgcgcagcatttctcccaggtcgcgatcgcgtccgcgcatgtgcgcctggcggtgcagctgccggacgctggcgcgcaggtaccggtacagggccgagcagaagttggccaacacggttcgatagctctcctcccgcgcccgtagctcggcgtggaagaaacgagagagcgcttcgtagtagagcccgaggccgtcgcgggtggccggaagcgtcgggaaggccacgtcgccgtgggcgcgaatgtcgatttgggcgcgttcggggacgtacgcgtccccccattccaccacatcgctgggcagcgttgataggaatttacactcccggtacaggtcggcgttggtcggtaacgccgaaaacaaatcctcgttccaggtatcgagcatggtacatagcgcggggcccgcgctaaagcccaagtcgtcgaggagacggttaaagagggcggcgggggggacgggcatgggcggggagggcatgagctgggcctggctcaggcgccccgttgcgtacagcggaggggccgccggggtgtttttgggacccccggccgggcgggggggtggtggcgaagcgccgtccgcgtccatgtcggcaaacagctcgtcgaccaagaggtccattgggtggggttgatacgggaaagacgatatcgggcttttgatgcgatcgtccccgcccgcccagagagtgtgggacgcccgacggcgcgggaagagaaaaacccccaaacgcgttagaggaccggacggaccttatggggggaagtgggcagcgggaaccccgtccgttcccgaggaatgacagcccgtggtcgccaccccgcatttaagcaacccgcacgggccgccccgtacctcgtgacttccccccacattggctcctgtcacgtgaaggcgaaccgagggcggctgtccaacccaccccccgccacccagtcacggtccccgtcggattgggaaacaaaggcacgcaacgccaacaccgaatgaacccctgttggtgctttattgtctgggtacggaagtttttcactcgacgggccgtctggggcgagaagcggagcgggctggggctcgaggtcgctcggtggggcgcgacgccgcagaacgccctcgagtcgccgtggccgcgtcgacgtcctgcaccacgtctggattcaccaactcgttggcgcgctgaagcaggtttttgccctcgcagaccgtcacgcggatggtggtgatgccaaggagttcgttgaggtcttcgtctgtgcgcggacgcgacatgtcccagagctggaccgccgccatccgggcatgcatggccgccaggcgcccgaccgcggcgcagaagacgcgcttgttaaagccggccacccggggggtccatggcgcgtcggggtttgggggggcggtgctaaagtgcagctttctggccagcccctgcgcgggtgtcttggatcgggttggcgccgtcgacgcgggggcgtctgggagtgcggcggattctggctgggccgatttcctgccgcgggtggtctccgccgccggggccgcgggggccttagtcgccacccgctgggttcggggggcccggggggcggtggtgggtgtgcgtccggcccctccggacccagcgggcggcggaggcgcccgcgcaggccccgggccggacaaaaccgccccggaaacgggacgccgcgtccgggggacctccgggtgttcgtcgtcttcggatgacgagcccccgtagagggcataatccgactcgtcgtactggacgaaacggacctcgcccctcgggcgcgcgcgtgtctgtagggcgccacggcgggaggtggcaggcggactatcgggactcgccatacatgaagacggggtgtagtacagatcctcgtactcatcgcgcggaacctcccgcggacccgacttcacggagcggcgagaggtcatggttccacgaacacgctagggtcggatgcgcggacaattaggcctgggttcggacggcggggggtggtgcaggtgtggagaggtcgagcgataggggcggcccgggagagaagagagggtccgcaaaacccactggggatgcgtgagtggccctctgtgggcggtgggggagagtcttataggaagtgcatataaccacaacccatgggtctaaccaatccccaggggccaagaaacagacacgccccaaacggtctcggtttccgcgaagaaggggaagtcctgggacaccctccacccccacccctcaccccacacagggcgggttcaggcgtgcccggcagccagtagcctctggcagatctgacagacgtgtgcgataatacacacgcccatcgaggccatgcctacataaaagggcaccagggcccccggggcagacatttggccagcgttttgggtctcgcaccgcgcgcccccgatcccatcgcgcccgccctcctcgccgggcggctccccgtgcgggcccgcgtctcccgccgctaaggcgacgagcaagacaaacaacaggcccgcccgacagacccttctgggggggcccatcgtccctaacaggaagatgagtcagtggggatccggggcgatccttgtccagccggacagcttgggtcgggggtacgatggcgactggcacacggccgtcgctactcgcgggggcggagtcgtgcaactgaacctggtcaacaggcgcgcggtggcttttatgccgaaggtcagcggggactccggatgggccgtcgggcgcgtctctctggacctgcgaatggctatgccggctgacttttgtgcgattattcacgcccccgcgctatccagcccagggcaccacgtaatactgggtcttatcgactcggggtaccgcggaaccgttatggccgtggtcgtagcgcctaaaaggacgcgggaatttgcccccgggaccctgcgggtcgacgtgacgttcctggacatcctggcgccccccccggccctcaccaagccgatttccctgcggcagttcccgcaactggcgcccccccctccaaccggggccgggatacgcgcagatccttggttggagggggcgctcggggacccaagcgtgactccggccctaccggcgcgacgccgagggcggtccctcgtctatgccggcgagctgacgccggttcagacggaacacggggacggcgtacgagaagccatcgccttccttccaaaacgcgaggaggatgccggtttcgacattgtcgtccgtcgcccggtcaccgtcccggcaaacggcaccacggtcgtgcagccatccctccgcatgctccacgcggacgccgggcccgcggcctgttatgtgttggggcggtcgtcgctcaacgcccgcggcctcctggtcgttcctacgcgctggctccccgggcacgtatgtgcgtttgttgtttacaaccttacgggggttcctgtgaccctcgaggccggcgccaaggtcgcccagctcctggttgcgggggcggacgctcttccttggatccccccggacaactttcacgggaccaaagcgcttcgaaactaccccaggggtgttccggactcaaccgccgaacccaggaacccgccgctcttggtgtttacgaacgagtttgacgcggaggcccccccgagcgagcgcgggaccgggggttttggctctaccggtatttagcccatagcttggggttcgttccgggcaataaaaaacgtttgtatctcatctttcctgtgtgtagttgtttctgttggaggcctgtgggtctatcacacccgcccctccatcccacaaacacagaacacacgggttggatgaaaacacgcatttattgacccaaaacacacggagctgctcgagatgggccagggcgaggtgcggttggggaggctgtaggtctgggaacggacacgcggggacacgattccggtttggggtccgggagggcgtcgccgtttcgggcggcaggcgccagcgtaacctccgggggcggcgtgtgggggtgccccaaggagggcgcctcggtcaccccaagcccccccaagcgggttcccccggcaaccccgaaggcggagaggccaagggcccgttcggcgatggccacatcctccatgaccacgtcgctctcggccatgctccgaatagcctgggagacgagcacatccgcggacttgtcagccgcccccacggacatgtacatctgcaggatggtggccatacacgtgtccgccaggcgccgcatcttgtcctgatgggccgccacggccccgtcgatcgtgggggcctcgagcccggggtggtggcgcgccagtcgttctaggttcaccatgcaggcgtggtacgtgcgggccaaggcgcgggccttcacgaggcgtcgggtgtcgtccagggaccccagggcgtcatcgagcgtgatgggggcgggaagtagcgcgttaacgaccaccagggcctcctgcagccgcggctccgcctccgagggcggaacggccgcgcggatcatctcatattgttcctcggggcgcgctccccagccacatatagccccgagaagagaagccatcgcgggcgggtactggcccttgggcgcgcggacgcaatggggcaggaagacgggaaccgcggggagaggcgggcggccgggactcccgtggaggtgaccgcgctttatgctaccgacgggtgcgttattacctcttcgatcgccctcctcacaaactctctactgggggccgagccggtttatatattcagctacgacgcatacacgcacgatggccgtgccgacgggcccacggagcaagacaggttcgaagagagtcgggcgctctaccaagcgtcgggcgggctaaatggcgactccttccgagtaaccttttgtttattggggacggaagtgggtgggacccaccaggcccgcgggcgaacccgacccatgttcgtctgtcgcttcgagcgagcggacgacgtcgccgcgctacaggacgccctggcgcacgggaccccgctacaaccggaccacatcgccgccaccctggacgcggaggccacgttcgcgctgcatgcgaacatgatcctggctctcaccgtggccatcaacaacgccagcccccgcaccggacgcgacgccgccgcggcgcagtatgatcagggcgcgtccctacgctcgctcgtggggcgcacgtccctgggacaacgcggccttaccacgctatacgtccaccacgaggcgcgcgtgctggccgcgtaccgcagggcgtattatggaagcgcgcagagtcccttctggtttcttagcaaattcgggccggacgaaaaaagcctggtgctcaccactcggtactacctgcttcaggcccagcgtctggggggcgcgggggccacgtacgacctgcaggccatcaaggacatctgcgccacctacgcgattccccacgccccccgccccgacaccgtcagcgccgcgtccctgacctcgtttgccgccatcacgcggttctgttgcacgagccagtacgcccgcggggccgcggcggccgggtttccgctttacgtggagcgccgtattgcggccgacgtccgcgagaccagtgcgctggagaagttcataacccacgatcgcagttgcctgcgcgtgtccgaccgtgaattcattacgtacatttacctggcccattttgagtgtttcagccccccgcgcctagccacgcatcttcgggccgtgacgacccacgaccccaaccccgcggccaacacggagcagccctcgcccctgggcagggaggccgtggaacaatttttttgccacgtgcgcgcccaactgaatatcggggagtacgtcaaacacaacgtgaccccccgggagaccgtcctggatggcgatacggccaaggcctacctgcgcgctcgcacgtacgcgcccggggccctgacgcccgcccccgcgtattgcggggccgtggactccgccaccaaaatgatggggcgtttggcggacgccgaaaagctcctggtcccccgcgggtggcccgcgtttgcgcccgccagtcccggggaggatacggcgggcggcacgccgcccccacagacctgcggaatcgtcaagcgcctcctgagactggccgccacggaacaacaggacaccacgcccccggcgatcgcggcgcttatccgtaatgcggcggtgcagactcccctgcccgtctaccggatatccatggtccccacgggacaggcatttgccgcgctggcctgggacgactgggcccgcataacgcgggacgctcgcctggccgaagcggtcgtgtccgccgaagcggcggcgcaccccgaccacggcgcgctgggcaggcggctcacggatcgcatccgcgcccagggccccgtgatgccccctggcggcctggatgccggggggcagatgtacgtgaatcgcaacgagatattcaacggcgcgctggcaatcacaaacatcatcctggatctcgacatcgccctgaaggagcccgtcccctttcgccggctccacgaggccctgggccactttaggcgcggggctctggctgcggttcagctcctgtttcccgcggcccgcgtggaccccgacgcatatccctgttattttttcaaaagcgcatgtcggcccggcccggcgtccgtgggttccggcagcggactcggcgacgacggggactggtttccctgctacgacgacgccggtgatgaggagtgggcggaggacccgggcgccatggacacatcccacgatcccccggacgacgaggttgcctactttgacctgtgccacgaagtcggccccacggcggaacctcgcgaaacggattcgcccgtgtgttcctgcaccgacaagatcggactgcgggtgtgcatgcccgtccccgccccgtacgtcgtccacggttctctaacgatgcggggggtggcacgggtcatccagcaggcggtgctgttggaccgagattttgtggaggccatcgggagctacgtaaaaaacttcctgttgatcgatacgggggtgtacgcccacggccacagcctgcgcttgccgtattttgccaaaatcgcccccgacgggcctgcgtgcggaaggctgctgccagtgtttgtgatcccccccgcctgcaaagacgttccggcgtttgtcgccgcgcacgccgacccgcggcgcttccattttcacgccccgcccacctatctcgcttccccccgggagatccgtgtcctgcacagcctgggtggggactatgtgagcttctttgaaaggaaggcgtcccgcaacgcgctggaacactttgggcgacgcgagaccctgacggaggtcctgggtcggtacaacgtacagccggatgcgggggggaccgtcgaggggttcgcatcggaactgctggggcggatagtcgcgtgcatcgaaacccactttcccgaacacgccggcgaatatcaggccgtatccgtccggcgggccgtcagtaaggacgactgggtcctcctacagctagtccccgttcgcggtaccctgcagcaaagcctgtcgtgtctgcgctttaagcacggccgggcgagtcgcgccacggcgcggacattcgtcgcgctgagcgtcggggccaacaaccgcctgtgcgtgtccttgtgtcagcagtgctttgccgccaaatgcgacagcaaccgcctgcacacgctgtttaccattgacgccggtacgccatgctcgccgtccgttccctgcagcacctctcaaccgtcgtcttgataacggcgtacggcctcgtgctcgtgtggtacaccgtcttcggtgccagtccgctgcaccgatgtatttacgcggtacgccccaccggcaccaacaacgacaccgccctcgtgtggatgaaaatgaaccagaccctattgtttctgggggccccgacgcacccccccaacgggggctggcgcaaccacgcccatatctgctacgccaatcttatcgcgggtagggtcgtgcccttccaggtcccacccgacgccatgaatcgtcggatcatgaacgtccacgaggcagttaactgtctggagaccctatggtacacacgggtgcgtctggtggtcgtagggtggttcctgtatctggcgttcgtcgccctccaccaacgccgatgtatgtttggtgtcgtgagtcccgcccacaagatggtggccccggccacctacctcttgaactacgcaggccgcatcgtatcgagcgtgttcctgcagtacccctacacgaaaattacccgcctgctctgcgagctgtcggtccagcggcaaaacctggttcagttgtttgagacggacccggtcaccttcttgtaccaccgccccgccatcggggtcatcgtaggctgcgagttgatgctacgctttgtggccgtgggtctcatcgtcggcaccgctttcatatcccggggggcatgtgcaatcacataccccctgtttctgaccatcaccacctggtgttttgtctccaccatcggcctgacagagctgtattgtattctgcggcggggcccggcccccaagaacgcagacaaggccgccgccccggggcgatccaaggggctgtcgggcgtctgcgggcgctgctgttccatcatcctctcgggcatcgcagtgcgattgtgttatatcgccgtggtggccggggtggtgctcgtggcgcttcactacgagcaggagatccagaggcgcctgtttgatgtatgacgtcacatccaggccggcggaaaccggaacggcatatgcaaattggaaactgtcctgtcttggggcccacccacccgacgcgtcatatgcaaatgaaaatcggtcccccgaggccacgtgtagcctggatcccaacgaccccgcccatgggtcccaattggccgtcccgttaccaagaccaacccagccagcatatccacccccgcccgggtccccgcggaagcggaacggtgtatgtgatatgctaattaaatacatgccacgtacttatggtgtctgattggtccttgtctgtgccggaggtggggcgggggccccgcccggggggcggaacgaggaggggtttgggagagccggccccggcaccacgggtataaggacatccaccacccggccggtggtggtgtgcagccgtgttccaaccacggtcacgcttcggtgcctctccccgattcgggcccggtcgctcgctaccggtgcgccaccaccagaggccatatccgacaccccagccccgacggcagccgacagcccggtcatggcgactgacattgatatgctaattgacctcggcctggacctctccgacagcgatctggacgaggacccacccgagccggcggagagccgccgcgacgacctggaatcggacagcagcggggagtgttcctcgtcggacgaggacatggaagacccccacggagaggacggaccggagccgatactcgacgccgctcgcccggcggtccgcccgtctcgtccagaagaccccggcgtacccagcacccagacgcctcgtccgacggagcggcagggccccaacgatcctcaaccagcgccccacagtgtgtggtcgcgcctcggggcccggcgaccgtcttgctcccccgagcagcacgggggcaaggtggcccgcctccaacccccaccgaccaaagcccagcctgcccgcggcggacgccgcgggcgtcgcaggggtcggggtcgcggtggtcccggggccgccgatggtttgtcggacccccgccggcgtgcccccagaaccaatcgcaacccggggggaccccgccccggggcggggtggacggacggccccggcgccccccatggcgaggcgtggcgcggaagtgagcagcccgacccacccggaggcccgcggacacggggcgtgcgccaagcaccccccccgctaatgacgctggcgattgcccccccgcccgcggacccccgcgccccggccccggagcgaaaggcgcccgccgccgacaccatcgacgccaccacgcggttggtcctgcgctccatctccgagcgcgcggcggtcgaccgcatcagcgagagctttggccgcagcgcacaggtcatgcacgacccctttggggggcagccgtttcccgccgcgaatagcccctgggccccggtgttggcgggccaaggagggccctttgacgccgagaccagacgggtctcctgggaaaccttggtcgcccacggcccgagcctctatcgcacttttgccggcaatcctcgggccgcatcgaccgccaaggccatgcgcgactgcgtgctgcgccaagaaaatttcatcgaggcgctggcctccgccgacgagacgctggcgtggtgcaagatgtgcatccaccacaacctgccgctgcgcccccaggaccccattatcgggacggccgcggctgtgctggataacctcgccacgcgcctgcggccctttctccagtgctacctgaaggcgcgaggcctgtgcggcctggacgaactgtgttcgcggcggcgtctggcggacattaaggacattgcatccttcgtgtttgtcattctggccaggctcgccaaccgcgtcgagcgtggcgtcgcggagatcgactacgcgacccttggtgtcggggtcggagagaagatgcatttctacctccccggggcctgcatggcgggcctgatcgaaatcctagacacacaccgccaggagtgttcgagtcgtgtctgcgagttgacggccagtcacatcgtcgcccccccgtacgtgcacggcaaatatttttattgcaactccctgttttaggtacaataaaaacaaaacatttcaaacaaatcgccccacgtgttgtccttctttgctcatggccggcggggcgtgggtcacggcagatggcgggggtgggcccggcgtacggcctgggtgggcggagggaactaacccaacgtataaatccgtccccgctccaaggccggtgtcatagtgcccttaggagcttcccgcccgggcgcatccccccttttgcactatgacagcgacccccctcaccaacctgttcttacgggccccggacataacccacgtggcccccccttactgcctcaacgccacctggcaggccgaaacggccatgcacaccagcaaaacggactccgcttgcgtggccgtgcggagttacctggtccgcgcctcctgtgagaccagcggcacaatccactgctttttctttgcggtatacaaggacacccaccacacccctccgctgattaccgagctccgcaactttgcggacctggttaaccacccgccggtcctacgcgaactggaggataagcgcggggtgcggctgcggtgtgcgcggccgtttagcgtcgggacgattaaggacgtctctgggtccggcgcgtcctcggcgggagagtacacgataaacgggatcgtgtaccactgccactgtcggtatccgttctcaaaaacatgctggatgggggcctccgcggccctacagcacctgcgctccatcagctccagcggcatggccgcccgcgcggcagagcatcgacgcgtcaagattaaaattaaggcgtgatctccaacccccccatgaatgtgtgtaaccccccaaaaaaataaacagccgtaacccaatcaaaccaggcgtggtgtgagtttgtggacccaaagccctcagagacaacgcgacaggccagtatggaccgtgatacttttatttattaactcacaggggcgcttaccgccacaggaataccagaataatgaccaccactatcgcgaccaccccaaatacagcatggcgccccaccacgccacaacagccctgtcgccggtatggggcatgatcagacgagccgcgagccgcgcgttgggccctgtacagctcgcgcgaattgaccctaggaggccgccacgcgcccgagttttgcgttcgtcgctggtcgtcgggcgccaaagccccggacggctgttcggtcgaacgaacggccacgacagtggcataggttggggggtggtccgacatagcctcggcgtacgtcgggaggcccgacaagaggtcccttgagatgtcgggtggggccacaagcctggtttccggaagaaacaggggggttgccaataacccgccagggccaaaactccggcgctgcgcacgtcgttcggcgcggcgccgggcgcgccgagcggctcgctgggcggcttggcgtgagcggccccgctccgacgcctcgccctctccggaggaggttggcggaattggcacggacgacaggggcccagcagagtacggtggaggtgggtccgtgggggtgtccagatcaataacgacaaacggcccctcgttcctaccagacaagctatcgtaggggggcgggggatcagcaaacgcgttccccgcgctccatagacccgcgtcgggttgcgccgcctccgaagccatggatgcgccccaaagccacgactcccgcgcgctaggtccttggggtaagggaaaaggccctactccccatccaagccagccaagttaacgggctacgccttcggggatgggactggcaccccggcggattttgttgggctggtacgcgttgcccaaccgagggccgcgtccacgggacgcgccttttataaccccgggggtcattcccaacgatcacatgcaatctaactggctcccctctccccccctctcccctctccccccctctcccctctccccccctctcccctctccccccctctcccctctccccccctctcccctctccccccctctcccctctccccccctctcccctctccccccctctcccctctccccccctctcccctctccccccctctcccctctccccccctgctctttccccgtgacacccgacgctggggggcgtggctgccgggaggggccgcggatgggcggggcctactcggtctcccgcccccgcccccgaaccgccccgccggccttgcccccctttgatcccctgctacccccaacccgtgctcgtggtgcgggttgggtggggggggggagtgtgggcgggggtgtgcgggaggtgtcggtggtggtggtggtggtaggaatggtggtgaggggggggggcgctggttggtcaaaaaagggagggacgggggccggcagaccgacggcgacaacgctccccggcggccgggtcgcggctcttacgagcggcccggcccgcgctcccaccccccgggccgtgtccttgctttccccccgtctccccccccctccttctcctcctcctcctcctcgtttttccaaaccccgcccacccggcccggcccggcccggccaccgccgcccacccacccacctcgggagacccagccccggtcccccgttccccgggggccgttatctccagcgccccgtccggcgcgccgccccccgccgctaaaccccatcccgcccccgggaccccacatataagcccccagccacacgcaagaacagacacgcagaacggctgtgtttatttaaataaaccgatgtcggaataaacaaacacaaacacccgcgacggggggacggagggaggggggtgacgggggacgggaacagccacaaaaaacacccacaaaaaaaaacagccacccccgacacccccccccacccccagtctcttcgccttttcccccccaccccacgcccccactgagcccggtcgatcgacgagcacccccgcccccgcccctgccccggcgacccccggcccgcacgatcccgacaacaataacaaccccaacggaaagcggcggggtgtgggggggggcgaggaacaaccgaggggaacgggggatggaaggacgggaagtggaagtcctgatacccatcctacacccccctgccttccaccctccggccccccgcgagtccacccgccggccggctaccgagaccgaacacggcggccgccgcagccgccgcagccgccgccgacaccgcagagccggcgcgcgcacacacaagcggcagaggcagaaaggcccagagtcattgtttatgtggccgcgggccagcagacggcccgcgacacccccccccccgcccgtgtgggtatccggccccccgccccgcgccggtccattaagggcgcgcgtgcccgcgagatatcaatccgttaagtgctctgcagacaggggcaccgcgcccggaaatccattaggccgcagacgaggaaaataaaattacatcacctacccacgtggtgctgtggcctgtttttgctgcgtcatctgagcctttataaaagcgggggcgcggccgtgccgatcgcgggtggtgcgaaagactttccgggcgcgtccgggtgccgcggctctccgggcccccctgcagccggggcggccaaggggcgtcggcgacatcctccccctaagcgccggccggccgctggtctgttttttgttttccccgtttcgggggtggggggggttgcggtttctgtttctttaacccgtctggggtgtttttcgttccgtcgccggaatgtttcgttcgtctgtcccctcacggggcgaaggccgcgtacggcccgggacgagggggcccccgaccgcggcggtccgggccccgtccgggcccgctcgccggcacgcgacgcgaaaaaggccccccggaggcttttccgggttcccggcccggggcctgagataaacaatcggggttaccgccaacggccggcccccgtggcggcccggcccggggccccggcggacccaaggggccccggcccggggccccacaacggcccggcgcatgcgctgtggtttttttttctcggtgttttgtcgggctccgtcgcctttcctgttctcgcttctccccccccccccttcttcacccccagtaccctcctccctcccttcctcccccgttatcccactcgtcaagggcgccccggtgtggttcaacaaagacgccgcgtttccaggtaggttagacacctgcttctccccaatagaggggggggacccaaacgacagggggcgccccagaggctaaggtcggccacgccactcgcgggtgggctcgtgttacagcacaccagcccgttcttttccccccctcccacccttagtcagactctgttacttacccgtccgaccaccaactgcccccttatctaagggccggctggaagaccgccagggggtcggccggtgtcgctgtaaccccccacgccaatgacccacgtactccaagaaggcatgtgtcccaccccgcctgtgtttttgtgcctggctctctatgcttgggtcttactgccgggggggggggagtgcgggggagggggggtgtggaaggaaatgcacggcgcgtgtgtaccccccctaaagttgttcctaaagcgaggatatggaggagtggcgggtgccgggggaccggggtgatctctggcacgcgggggtgggaagggtcgggggaggggggatggggtaccggcccacctggccgacgcgggtgcgcgtgcctctgcacaccaaccccacgtcccccggcggtctctaagaagcaccgccccccctccttcataccaccgagcatgcctgggtgtgggttggtaaccaacacgcccatcccctcgtctcctgtgattctctggctgcaccgcattcttgttttctaactatgttcctgtttctgtctccccccccacccctccgccccaccccccaacacccacgtctgtggtgtggccgacccccttttgggcgccccgtcccgccccgccacccctcccgtcctttgttgccctatagtgtagttaacccccccccgccctttgtggcggccagaggccaggtcagtccgggcgggcaggcgctcgcggaaacttaacacccacacccaacccactgtggttctggctccatgccagtggcaggatgctttcggggatcggtggtcaggcagcccgggccgcggctctgtggttaacaccagagcctgcccaacatggcacccccactcccacgcacccccactcccacgcacccccactcccacgcacccccactcccacgcacccccactcccacgcacccccactcccacgcacccccactcccacgcacccccactcccacgcacccccactcccacgcacccccgagatccatccaacacagacagggaaaagatacaaaagtaaacctttatttcccaatagacagcaaaaatcccctgagttttttattagggccaacactaaagacccgctggtgtgtggtgcccgtgtctttcacttttcccctccccgacacggattggctggtgtagtgggcgcggccagagaccacccagcgcccgacccccccctccccacaaacacggggggcgtcccttattgttttccctcgtcccgggtcgacgccccctgctccccggaccacgggtgccgagaccgcaggctgcggaagtccagggcgcccactagggtgccctggtcgaacagcatgttccccacgggggtcatccagaggctgttccactccgacgcgggggccgtcgggtactcggggggcatcacgtggttacccgcggtctcggggagcagggtgcggcggctccagccggggaccgcggcccgcagccgggtcgccatgtttcccgtctggtccaccaggaccacgtacgccccgatgttccccgtctccatgtccaggatgggcaggcagtcccccgtgatcgtcttgttcacgtaaggcgacagggcgaccacgctagagacccccgagatgggcaggtagcgcgtgaggccgcccgcgggggcggccccggaagtctccgcgtggcgcgtcttccgggcacacttcctcggcccccgcggcccagaagcagcgcgggggccgagggaggtttcctcttgtctccctcccagggcaccgacggccccgcccgaggaggcggaagcggaggaggacgcggccccggcggcggaagaggcggcccccgcgggagtcggggccgaggaggaagaggcagaggaggaagaggcggaggccgccgaggacgtcaggggggtcccgggcccaccctggccgcgcccccccggccctgagtcggagggggggtgcgtcgccgccctcttggcccctgccggcgcgagggggggacgcgtggactggggggaggggttttcctggcccgacccgcgcctcttcctcggacgcaccgccgcctcctgctcgacagaggcggcggaggggagcgggggggcgccggagggggcggcgccgcgggagggcccgtgtccaccctccacgcccggcccccccgagccgcgcgccaccgtcgcacgcgcccggcacagactctgttcttggttcgcggcctgagccagggacgagtgcgactggggcacacggcgcgcgtccgcgggggccggggcgcgggggccgggccccggaggcggcgctcgcacgcacggggccacggccgcgcgggggcgcgcgggtcccgacgcggccgaggacgcggtgggcccggggcggggggcggagcctggcatgggcgccgcggggggcctgtggggagaggccgggggggagtcgctgatcactatggggtctctgttgtttgcaaggggggcgggtctgttgacaagggggcccgtccggcccctcggccgccccgcctccgcttcaacaaccccaaccccaaccccaacccccccggaggggccagacgccccccgcggcgccgcggctcgcgactggcgggagccgccgccgccgccgctgctgttggtggtggtgttggtgttactgctgccgtgtggcccgatgggcgccgaggggggcgctgtccgagccgcggccggctggggggctgcgtgagacgccccgcccgtcacggggggcgcggcggcgcctctgcgtgggggggcgcggggcgtccggcggggggcgggcggtacgtagtctgctgcaagagacaacggggggcgcgatcaggttacgccccctcccaggccctccctttccgcgcccgccctttcctcgcccccccgcccgcctattcctccctcccccctcctcctcctcctcccccagggtcctcgccgcccccccgcctcaccgtcgtccaggtcgtcgtcatcctcgtccgtggtgggctcagggtgggtgggcgacagggccctcaccgtgtgcccccccagggtcaggtaccgcggggcgaaccgctgattgcccgtccagataaagtccacggccgtgcccgccctgacggcctcctcggcctccatgcgggtctgggggtcgttcacgatcgggatggtgctgaacgacccgctgggcgtcacgcccactatcaggtacaccagcttggcgttgcacagcgggcaggtgttgcgcaattgcatccaggttttcatgcacgggatgcagaagcggtgcatgcacgggaaggtgtcgcagcgcaggtggggcgcgatctcatccgtgcacacggcgcacacgtcgccctcgtcgctccccccgtcctctcgagggggggcgcccccgcaactgccggggtcttcctcgcggggggggctcccccccgagaccgcccccccatccacgccctgcggccccagcagccccgtctcgaacagttccgtgtccgtgctgtccgcctcggaggcggagtcgtcgtcatggtggtcggcgtccccccgcccccccacttcggtctccgcctcagagtcgctgctgtccggcaggtctcggtcgcagggaaacacccagacatccggggcgggctaaggggaaaaaaaggggggcgggtaagaatggggggatttcccgcgtcaatcagcgcccacgagttccccctctccccccccccgcctcacaaagtcctgcccccctgctggcctcggaagaggggggagaaaggggtctgcaaccaaaggtggtctgggtccgtcctttggatcccgacccctcttcttccctcttctcccgccctccagacgcaccggagtcgggggtcccacggcgtcccccaaatatggcgggcggctcctccccacccccctagatgcgtgtgagtaagggggccctgcgtatgagtcagtggggaccacgccccctaacacggcgaccccggtccctgtgtgtttgttgtgggggcgtgtctctgtgtatgagtcagggggtcccacggcgaccccgggccctgcgtctgagtcaaaggggccatgtgtatgtgttggggggtctgtatatataaagtcagggggtcacatggcgacccccaacagggcgaccccggtccctgtatatatagggtcagggggttccgcgccccctaacatggcgcccccggtccctgtatatatagtgtcacggggttccacgccccctaacatggcgcccggctcccgtgtatgagtgggggtcccccaacatggcggccggttccagtgtaagggtcgggggtcccccaacatggcgccccccaatatggcgccccccaatatggcgccccagacatggcgcccggcccctcacctcgcgctgggggcggccctcaggccggcgggtactcgctccggggcggggctccatgggggtcgtatgcggttggagggtcgcggacggagggtccctgggggtcgcaacgtaggcggggcttctgtggtgatgcggagagggggcggcccgagtctgcctggctgctgcgtctcgctccgagtgccgaggtgcaaatgcgaccagactgtcgggccagggctaacttataccccacgcctttcccctccccaaaggggcggcagtgacgattcccccaatggccgcgcgtcccaggggaggcaggcccaccgcggggcggccccgtccccggggaccaacccggcgcccccaaagaatatcattagcatgcacggcccggcccccgatttgggggaccaacccggtgtcccccaaagaaccccattagcatgcccctcccaccgacgcaacaggggcttggcctgcgtcggtgccccggggcttcccgccttcccgaagaaactcattaccatacccggaaccccaggggaccaatgcgggttcattgagcgacccgcgggccaatgcgcgaggggccgtgtgttccgccaaaaaagcaattagcataacccggaaccccaggggagtggttacgcgcggcgcgggaggcggggaataccggggttgcccattaagggccgcgggaattgccggaagcgggaagggcggccggggccgcccattaatgagtttctaattaccataccgggaagcggaacaaggcctcttgcaagtttttaattaccataccgggaagtgggcggcccggcccattgggcggtaactcccgcccaatgggccgggccccgaagactcggcggacgctggttggccgggccccgccgcgctggcggccgccgattggccagtcccgcccccgaggcggcccgccctgtgagggcgggctggctccaagcgtatatatgcgcggctcctgccatcgtctctccggatctagagatctccggaattaattcgccctatagtgagtcggaattttaaccgccaccgccagagccacctccacctgacccgccgcctcctagatcttcttctgagatgagtttttgttctgaattcccgataggaatccccactgtgttgacctggtccttgagtcccagcaggctgtaggcaatacgcttctggtggccaggaagacgcactccgatccttttgatgtcttcgttggacatctgtaccaccttctcgatggccgtgtagccagccaccatgaagtgttccgtgtactgttgcatcttgatgctctccagccactcggacaccgtacggaaggggactccctccgagccgctggtgctgggcagccggatggacactcggggatcaaagtcagccagcgtcttgagggagtcgggggctcggatgagcttgtccaggatgctaacgatgtcggcaaacttgggtcggcgggagcgctcttgctgccagcactgcatcatgagctggtaaatggctgaagggcagtccatgggcgtagggagccggaagccgtcgttgatggctttcatgacctcgtggtttgacagttcccagtagggccgttcgccataagtcatcacttcccacatgacaatgccgtagctccacacatcgctggctgaggtgaacttgcggtaggaaatggcctctggggctgtccatcgaatagggatcttgccgccacttgtggtgtaggtggcctcggggtcatcttccagcacacgcgacaggccaaaatcggacaccttgcacaccaggttgctgttgacgaggatgttgcgggcggccaggtcccggtgcacgtagttcatgttggccaggtacttcatgccggatgcgatacccctcagcatgcccaccaactgaagtacactgaactcaccatccttctccctaaggaacttgtctagcgctccattctccatgtactctgtgataatcatcatgggtttgtatttagagaccacgccctccaggcggatgatattgtggtggctaaactggcccatgatgctggcctcgctcaggaagtccacccgctgcttctcagtgtagcccgctttcagtgtcttgatggccaccggtatctccttcttccccgaggatgccttcagcgtccctttatagacctctccaaactctcctgctccaatgaccttctgccttgccacacaggatgggtggatctcggtggtaaacttgagtacagcctggttggggtcttcgtaagtgtgaggatccacataggtcttcaggggctttagttgttctgacttggaaaaacggacatcctcagaggactggcgagcccgcaggttcctcctccttcgatggatgaagaggccaactcctgccagtaccagaagcaaaacaacacctacagccacaccgccgatcaccgccatgttggcagatccttccgtggacagtgtctggaactcgtgcactttgctgccggctccctggccctcctgcgtcagcgcctgcacctgcaccaggtacgtggtatccggagcaaggtcatccagggtcacggagaagccttccgtgcggcgcacattatagctgttggcatcccccttcttgcggtaggtgacttcgtacttccacacacggctctgctgtgacaccgggatgctccaggtgacactcagggaggtggtgcttcggtcctccagcctcactttggggggctctgtttggttaatactgacgctggcagtccggaagcttcggctagtcaccaggcctgagacaccattgcgtgcttcgacagcgaaggtatagttcatgtggggctccaggtcactgactgtcacactcgtgcgggtcagggcgtgaggaggttctgaatagcgcacgctcgcctcacagggcccacactcgccagactctggccagcactgttcgcaagtgacactgtagacaatgtcctggcggccaccagtgtccttgggagctgtccaacgcagttctactttggcacccatgccaatggccgtgaggtagttgggggcagagggtggacgtgtgcaagacatggacagtgggtcctcaggtgccctgaaatagccttcttcacactggcaggaggtggcaccctctgtggatggcagggtatgctctggacactccaggcaagggctctcagatgcctcagacttgaagaatcctggagaacaggctcggcaggcatcctcgaccttctcgtagccttcctggcacaggcactgcccgatgggcaccagccactcgccatccaccgtgcagtgcatgagaggcccctcgcccccataaggcaccacggcatggtccacgcaggtaccggccaccgtggccaggggttgtgtatcggagacagcgacagcaatggtctcggggaagcgagccaagctctgcagcatctcgggacacttcttgtagtagacgcgaacggagagcagcgccacgcaggcgccgatgtcctggaaggccaggtagaagcccttccgggtaaggggccccaccatgcgctcctctacgttcagcttgacattgcgagcctcgaagtcactgctgaccgtgatctcgtcaggggcgatggtgtcaatcttggtgaactggcgcttctggaagttggtgccatagtccacatctgactctgcatagtagaggttgaaggtctctttgcatgagctggcgccacccgggaagctgttacagtctcgcaccgtgaacttgagctcaataaagatgcgctcggcctcctcccggtacacccagttggtgcggagccagttgtcctggtcgccggataccacgttgcacaccgagtacatgtagataggcatgtcgtccatgatgttctgcatcaggtcccaccctttgccataggggtgcgtgagccagccgagctctcccttcattgctgcgaagtccaacaaaacaacttcctttccctgtgccgccgcggccgccagcgcgcaaccccacagcagcgccaggcagaaaccgactgcccggagctccatggtcgacccgggatccggtaccactttgtgcggccagcttcctaggagatcctctagctagagtcggtgtcttctatggaggtcaaaacagcgtggatggcgtctccaggcgatctgacggttcactaaaccagctctgcttatatagagctcggggagcagaagcgcgcgaacagaagcgagaagcgaactgattggttagttcaaataaggcacagggtcatttcaggtccttggggcaccctggaaacatctgatggttctctagaaactgctgagggcgggaccgcatctggggaccatctgttcttggccctgagcggggcaggaactgcttaccacagatatcctgtttggcccatattctcctgttccaactgttcttggccctgagcggggcaggaactgcttaccacagatatcctgtttggcccatattctcctgtttctctgttcctgaccttgatcctagcttgccaaacctacaggtggggtctttcattcccataggcggttacctgggactgtgcggttgggacggcgcccgtgggcccgggcggccgggggcggcgggggccgcgatggcggcggcggcgggccatggagacagagagcgtgccggggtggtagagtttgacaggcaagcatgtgcgtgcagaggcgagtagtgcttgcctgtctaactcgctcgtctcggccgcggggggcccgggctgcgccgccgcgctttaaagggccgcgcgcgacccccggggggtgtgtttcggggggggcccgttttccgctcctccccccgctcctccccccgctcctccccccgctcctccccccgctcctccccccgctcctccccccgctcctccccccgctcctccccccgctcctccccccgctcctccccccgctcctccccccgctcctccccccgctcctccccccgctcctccccccgctcctccccccgctcctccccccgctcctccccccgctcctccccccgctccccaacgcccgccgcgcgcgcgcacgccgcccggaccgccgcccgccttttttgcgcgccgccccgcccgcggggggcccgggctgccacaggtgtaacaacaccaacagaacaccaacagcacggcgcaccggcgactccggttcctcatccacacgtcacacgtcacgtcatccaccacacctgcccaccaacacaactcacagcgacaactcaccgcgcaacaactcctgttcctcatccacacgtcaccgcgcaccccccgctcctccagacgtcccccagcgcaacacgccgctcctgtcacacaccaccgccccagccctccccagccccagccctccccagccccagccctccccggccccagccctccccggccccagccctccccggccccagccctccccggccccagccctccccggccccagccctccccggccccagccctccccggccgcgtcccgcgctccctcgggggggttcgggcatctctacctcagtgccgccaatctcaggtcagagatccaaaccctccgggggcgcccgcgcaccaccaccgcccctcgccccctcccgcccctcgccccctcccgcccctcgccccctcccgcccctcgccccctcccgcccctcgccccctcccgcccctcgccccctcccgcccctcgccccctcccgcccctcgccccctcccgcccctcgccccctcccgcccctcgccccctcccgcccctcgccccctcccgcccctcgccccctcccgcccctcgccccctcccgcccctcgccccctcccgcccctcgccccctcccgcccctcgccccctcccgcccctcgccccctcccgcccctcgccccctcccgcccctcgccccctcccgcccctcgaaataaacaacgctactgcaaaactaaatcaggtcgttgtcgtttattgcgtcttcgggtttcgcaagcgccccgccccgtcccggcccgttacagcaccccgtccccctcgaacgcgccgccgtcgtcgtcgtcccaggcgccttcccagtccacaacttcccgtcgcgggggcgtggccaagcccgcctccgcccccagcacctccacggcccccgccgccgccagcacggtgccgctgcggcccgtggccgaggcccagcgaatcccgggcaacgccggcggcagggcccccgggccgtcgtcgtcgtcgtcgccgccgcgcagcaccagcgggggggcgtcgtcgtcgggctccagcagggcgcgggcgcaaaagtccctccgcggcccgcgccaccgggccgggccggcgcgcaccgcctcgcgccccagcgccacgtacacgggccgcagcggcgcgcccaggccccagcgcgcgcaggcgcggtgcgagtgggcctcctcctcgcagaagtccggcgcgccgggcgccatggcgtcggtggtccccgaggccgccgcccggccgtccagcgccggcagcacggcccggcggtactcgcgcggggacatgggcaccggcgtgtccgggccgaagcgcgtgcgcacgcggtagcgcacgttgccgccgcggcacaggcgcagcggcggcgcgtcggggtacaggcgcgcgtgcgcggcctccacgcgcgcgaagacccccgggccgaacacgcggcccggggccagcaccgtgcggcgcaggtcccgcgccgccggccagcgcacggcgcactgcacggcgggcagcaggtcgcacgccaggtaggcgtgctgccgcgacaccgcgggcccgtcggcgggccagtcgcaggcgcgcacggtgttgaccacgatgagccgccggtcgccggcgctggcgagcagccccagaaactccacggccccggcgaaggccaggtcccgcgtggacagcagcagcacgccctgcgcgcccagcgccgacacgtcgggggcgccggtccagttgcccgcccaggcggccgtgtccggcccgcacagccggttggccagggccgccagcaggcaggacagcccgccgcgctcggcggaccactccggcggcccccccgaggccccgccgccggccaggtcctcgcccggcagcggcgagtacagcaccaccacgcgcacgtcctcggggtcggggatctggcgcatccaggccgccatgcggcgcagcgggcccgaggcgcgcagggggccaaagaggcggcccccggcggccccgtgggggtgggggttatcgtcgtcgtcgccgccgccgcacgcggcctgggcggcggcggcgggcccggcgcaccgcgcggcgatcgaggccagggcccgcgggtcaaacatgagggccggtcgccaggggacggggaacagcgggtggtccgtgagctcggccacggcgcgcggggagcagtaggcctccagggcggcggccgcgggcgccgccgtgtggctgggccccgggggctgccgccgccagccgcccagggggtcggggccctcggcgggccggcgcgacagcgccacggggcgcgggcgggcctgcgccgcggcggcccggggcgccgcgggctgggcgggggcgggctcgggccccgggggcgtggaggggggcgcggggaggggggcgcgggcgtccgagccgggggcgtccgcgccgctcttcttcgtcttcgggggtcgcgggccgccgcctccgggcggccgggccgggccgggactcttgcgcttgcgcccctcccgcggcgcggcggaggcggcggcggccgccagcgcgtcggcggcgtccggtgcgctggcggccgccgccagcagggggcgcaggctctggttctcaaacagcaggtccgcggcggcggcggccgcggagctcggcaggcgcgggtcccgcggcagcgcggggcccagggccccggcgaccaggctcacggcgcgcacggcggccacggcggcctcgctgccgccggccacgcgcaggtccccgcgcaggcgcatgagcaccagcgcgtcgcgcacgaaccgcagctcgcgcagccacgcgcgcaggcggggcgcgtcggcgtgcggcggcggcggggaagcggggcccgcgggtccctccggccgcggggggctggcgggccgggccccggccagccccgggacggccgccaggtcgccgtcgaagccctcggccagcgcctccaggatcccgcggcaggcggccaggcactccacggccacgcggccggcctgggcgcggcgcccggcgtcgtcgtcggcgtcggcgtggcgggcggcgtcggggtcgtcgccccccgcgggggaggcgggcgcggcggacagccgccccagggcggcgaggatccccgcggcgccgtacccggcgggcaccgcgcgctcgcccggtgcggcggcggcggcgacgacggcggcggcgaccccctcgtcatctgcgccggcgccggggctccccgcggcccccgtcagcgccgcgttctcgcgcgccaacaggggcgcgtaggcgcggcgcaggctggtcagcaggaagcccttctgcgcgcggtcgtatcggcggctcatggccacggcggccgccgcgtgcgccaggccccagccgaagcggccggccgccatggcgtagcccaggtggggcacggcccgcgccacgctgccggtgatgaaggagctgctgttgcgcgcggcgcccgagatccggaagcaggcctggtccagcgccacgtccccggggaccacgcgcgggttctggagccaccccatggcctccgcgtccggggtgtacagcagccgcgtgatcagggcgtactgctgcgcggcgtcgcccagctcgggcgcccacacggccgccggggcgcccgaggcctcgaaccggcgtcgcgcctcctccgcctcgggcgccccccagaggcccgggcggctgtcgcccaggccgccgtacagcacccgccccgggggcgggggcccggcgccgggccacggctccccgctgacgtacccgtcgcgatagcgcgcgtagaaggcgccggaggccgcgtcggcgtccagctcgacccgccggggctgcccggccgtgaagcggcccgtggcgtcgcggccggccaccgccgcgcgggcccggcggcgctcgatgcggcccgcggaggccgcgggggtcctcgccgccgcccggggcttgggcgcggcctcggagagggggggtggcccgggcgggggcggcgtccgcccgggggcttccggcgccgcgctcgacggaccccgcccgacggcccgcgcctcgcgtgcgcggtcggccgcgtcgttgccgtcgtcgtcctcgtcctcgtcggacgacgaggacgaagaggatgcggacgacgaggacgaggacccggagtccgacgaggtcgatgacgccgatggccgccgccggccgtgacgacgtctccgcggcggctgggccggcgggcgcggcgacaggcggtccgtggggtccggatacgcgccgcgtagcggggcctcccgtgcgcggccccgggccggggcccggtcgccggcggcgtcggctgcgtcgtcgtactcgtccccgtcatcgtcgtcggctcgaaaggcgggggtccggggcggcgaggccgcggggtcgggcgtcgggatcgtccggacggcctcctctaccatggaggccagcagggccagctgtcgcggcgagacggcgtccccggcgtcctcgccggcgtcggtgcccgccgcgggggccctcccgtcccgccgggcgtcgtcgaggtcgtgggggtggtcggggtcgtggtcggggtcgtccccgccctcctccgtctccgcgccccacccgagggccccccgctcgtcgcggtctgggctcggggtgggcggcggcccgtcggtggggcccggggagccggggcgctgcttgttctccgacgccatcgccgatgcggggcgatcctccggggatacggctgcgacggcggacgtagcacggtaggtcacctacggactctcgatggggagggggcgagacccacggaccccgacgacccccgccgtcgacgcggaactagcgcggaccggtcgatgcttgggtgggaaaaaggacagggacggccgatccccctcccgcgcttcgtccgcgtatcggcgtcccggcgcggcgagcgtctgacggtctgtctctggcggtcccgcgtcgggtcgtggatccgtgtcggcagccgcgctccgtgtggacgatcggggcgtcctcgggctcatatagtcccaggggccggcgggaaggaggagcagcggaggccgccggccccccgccccccaggcgggcccgccccgaacggaattccattatgcacgaccccgccccgacgccggcacgccgggggcccgtggccgcggcccgttggtcgaacccccggccccgcccatccgcgccatctgccatgggcggggcgcgagggcgggtgggcccgcgccccgccccgcatggcatctcattaccgcccgatccggtggtttccgcttccgttccgcatgctaacgaggaacgggccgggggcggggcccgggccccgacttcccggttcggcggtaatgagatacgagccccgcgcgcccgttggccgtccccgggcccccggtcccgcccgccggacgttgggaccaacgggacggcgggcggcccaagggccgcccgccttgccgcccccccattggccggcgggcgggaccgccccaagggggcggggccgccgggtaaaagaagtgagaacgcgaagcgttcgcacttcgtcccaatatatatatattattagggcgaagtgcgagcactggcgccgtgcccgactccgcgccggccccgggggcgggcccgggcggcggggggcgggtctctccggcgcacataaaggcccggcgcgaccgacgcccgcagacggcgccggccacgaacgacgggagcggctgcggagcacgcggaccgggagcgggactcgcagagggccgtcggagcggacggcgtcggcatcgcgacgccccggctcgggatcgggatcgcatcggaaagggacacgcggaaagacccacccaccccacccacgaaacacaggggacgcaccccgggggcctccgacgacagaaacccaccggtccgcctttgtgcacgggtaagcaccttgggtgggcggaggagggggggacgcgggggcggaggaggggggacgcgggggcggaggaggggggacgcgggggcggaggaggggggacgcgggggcggaggaggggggacgcgggggcggaggagggggctcacccgcgttcgtgccttcccgcaggaggaacgtcctcgtcgaggcgaccggcggcgaccgttgcgtggaccgcttcctgctcgtcgggcggggggaagccactgtggtcctccgggacgttttctggatggccgacatttccccaggcgcttttgcgccttgtgtaaaagcgcggcgtcccgctctccgatccccgcccctgggcacgcgcaagcgcaagcgcccttcccgccccctctcatcggagtctgaggtagaatccgatacagccttggagtctgaggtcgaatccgagacagcatcggattcgaccgagtctggggaccaggatgaagccccccgcatcggtggccgtagggccccccggaggcttggggggcggttttttctggacatgtcggcggaatccaccacggggacggaaacggatgcgtcggtgtcggacgaccccgacgacacgtccgactggtcttatgacgacattcccccacgacccaagcgggcccgggtaaacctgcggctcacgagctctcccgatcggcgggatggggttatttttcctaagatggggcgggtccggtctacccgggaaacgcagccccgggcccccaccccgtcggccccaagcccaaatgcaatgctacggcgctcggtgcgccaggcccagaggcggagcagcgcacgatggacccccgacctgggctacatgcgccagtgtatcaatcagctgtttcgggtcctgcgggtcgcccgggacccccacggcagtgccaaccgcctgcgccacctgatacgcgactgttacctgatgggatactgccgagcccgtctggccccgcgcacgtggtgccgtttgctgcaggtgtccggcggaacctggggcatgcacctgcgcaacaccatacgggaggtggaggctcgattcgacgccaccgcggaacccgtgtgcaagcttccttgtttggagaccagacggtacggcccggagtgtgatcttagtaatctcgagattcatctcagcgcgacaagcgatgatgaaatctccgatgccaccgatctggaggccgccggttcggaccacacgctcgcgtcccagtccgacacggaggatgccccctcccccgttacgctggaaaccccagaaccccgcgggtccctcgctgtgcgtctggaggatgagtttggggagtttgactggaccccccaggagggctcccagccctggctgtctgcggtcgtggccgataccagctccgtggaacgcccgggcccatccgattctggggcgggtcgcgccgcagaagaccgcaagtgtctggacggctgccggaaaatgcgcttctccaccgcctgcccctatccgtgcagcgacacgtttctccggccgtgagtccggtcgccccgacccccttgtatgtccccaaataaaagaccaaaatcaaagcgtttgtcccagcgtcttaatggcgggaagggcggagagaaacagaccacgcgtacatggggggtgtttgggggtttattgacatcggggctacagggtggtaaccggatagcagatgtgaggaagtctgggccgttcgccgcgaacggcgatcagagggtccgtttcttgcggaccacggcccggtgatgtgggttgctcgtctgggatctcgggcatgcccatacacgcacaacacggacgccgcaccggatgggacgtcgtaagggggcctggggtagctgggtggggtttgtgcagagcaatcagggaccgcagccagcgcatacaatcgcgctcccgtccgtttgtcccgggcagtaccacgccgtactggtattcgtaccggctgagcagggtctccagggggtggttgggggccgcggggaacggggtccacgccacggtccactcgggcaaaaaccgagtcggcacggcccacggttctcccacccacgcgtctggggtcttgatggcgataaatcttaccccgagccggattttttgggcgtattcgagaaacggcacacacagatccgccgcgcctaccacccacaagtggtagaggcgaggggggctgggttggtctcggtgcagcagtcggaagcacgccacggcgtccacgacctcggtgctctccaaggggctgtcctccgcaaacaggcccgtggtggtgtttggggggcagcgacaggacctagtgcgcacgatcgggcgggtgggtttgggtaagtccatcagcggctcggccaaccgtcgaaggttggccggacgaacgacgaccggggtacccaggggttctgatgccaaaatgcggcactgcctaagcaggaagctccacagggccgggcttgcgtcgacggaagtccggggcagggcgttgttctggtcaaggagggtcattacgttgacgacaacaacgcccatgttggtatattacaggcccgtgtccgatttggggcacttgcagatttgtaaggccacgcacggcggggagacaggccgacgcgggggctgctctaaaaatttaagggccctacggtccacagacccgccttcccgggggggcccttggagcgaccggcagcggaggcgtccgggggaggggagggtgatttacgggggggtaggtcagggggtgggtcgtcaaactgccgctccttaaaaccccggggcccgtcgttcggggtgctcgttggttggcactcacggtgcggcgaatggcctgtcgtaagttttgtcgcgtttacgggggacagggcaggaggaaggaggaggccgtcccgccggagacaaagccgtcccgggtgtttcctcatggccccttttataccccagccgaggacgcgtgcctggactccccgcccccggagacccccaaaccttcccacaccacaccacccggcgatgccgagcgcctgtgtcatctgcaggagatcctggcccagatgtacggaaaccaggactaccccatagaggacgaccccagcgcggatgccgcggacgatgtcgacgaggacgccccggacgacgtggcctatccggaggaatacgcagaggagctttttctgcccggggacgcgcccggtccccttatcggggccaacgaccacatccctcccccgtgtggcgcatctccccccggtatacgacgacgcagccgggatgagattggggccacgggatttaccgcggaagaactggacgccatggacagggaggcggctcgagccatcagccgcggcggcaagcccccctcgaccatggccaagctggtgactggcatgggctttacgatccacggagcgctcaccccaggatcggaggggtgtgtctttgacagcagccacccagattacccccaacgggtaatcgtgaaggcggggtggtacacgagcacgagccacgaggcgcgactgctgaggcgactggaccaccccgcgatcctgcccctcctggacctgcatgtcgtctccggggtcacgtgtctggtcctccccaagtaccaggccgacctgtatacctatctgagtaggcgcctgaacccgctgggacgcccgcagatcgcagcggtctcccggcagctcctaagcgccgttgactacattcaccgccagggcattatccaccgcgacattaagaccgaaaatatttttattaacacccccgaggacatttgcctgggggactttggtgccgcgtgcttcgtgcagggttcccgatcaagccccttcccctacggaatcgccggaaccatcgacaccaacgcccccgaggtcctggccggggatccgtataccaccaccgtcgacatttggagcgccggtctggtgatcttcgagactgccgtccacaacgcgtccttgttctcggccccccgcggccccaaaaggggcccgtgcgacagtcagatcacccgcatcatccgacaggcccaggtccacgttgacgagttttccccgcatccagaatcgcgcctcacctcgcgctaccgctcccgcgcggccgggaacaatcgcccgccgtacacccgaccggcctggacccgctactacaagatggacatagacgtcgaatatctggtttgcaaagccctcaccttcgacggcgcgcttcgccccagcgccgcagagctgctttgtttgccgctgtttcaacagaaatgaccgcccccagggggcggtgctgtttgcgggttggcacaaaaagaccccgacccgcgtctgtggtgtttttggcatcatgtcgccgggcgccatgcgtgccgttgttcccattatcccattccttttggttcttgtcggtgtatcgggggttcccaccaacgtctcctccaccacccaaccccaactccagaccaccggtcgtccctcgcatgaagcccccaacatgacccagaccggcaccaccgactctcccaccgccatcagccttaccacgcccgaccacacaccccccatgccaagtatcggactggaggaggaggaagaggaggagggggccggggacggcgaacatcttgaggggggagatgggacccgtgacaccctaccccagtccccgggcccagccttcccgttggctgaggacgtcgagaaggacaaacccaaccgtcccgtagtcccatcccccgatcccaacaactcccccgcgcgccccgagaccagtcgcccgaagacaccccccaccattatcgggccgctggcaactcgccccacgacccgactcacctcaaagggacgacccttggttccgacgcctcaacataccccgctgttctcgttcctcactgcctcccccgccctggacaccctcttcgtcgtcagcaccgtcatccacaccttatcgtttttgtgtattggtgcgatggcgacacacctgtgtggcggttggtccagacgcgggcgacgcacacaccctagcgtgcgttacgtgtgcctgccgtccgaacgcgggtagggtatggggcgggggatggggagagcccacacgcggaaagcaagaacaataaaggcggtggtatctagttgatatgcatctctgggtgtttttggggtgtggcggacgcggggcggtcattggacggggtgcagttaaatacatgcccgggacccatgaagcatgcgcgacttccgggcctcggaacccacccgaaacggccaacggacgtctgagccaggcctggctatccggagaaacagcacacgacttggcgttctgtgtgtcgcgatgtctctgcgcgcagtctggcatctggggcttttgggaagcctcgtgggggctgttcttgccgccacccatcggggacctgcggccaacacaacggaccccttaacgcacgccccagtgtcccctcaccccagccccctggggggctttgccgtccccctcgtagtcggtgggctgtgcgccgtagtcctgggggcggcgtgtctgcttgagctcctgcgtcgtacgtgccgcgggtgggggcgttaccatccctacatggacccagttgtcgtataatttcccccccccccccccttctccgcatgggtgatgtcgggtccaaactcccgacaccaccagctggtatggtataaatcaccggtgcgccccccaaaccatgtccggcagggggatgggggggcgaatgcggagggcacccaacaacaccgggctaaccaggaaatccgtggccccggcccccaataaagatcgcggtagcccggccgtgtgacactatcgtccataccgaccacaccgacgaatcccctaagggggaggggccattttacgaggaggaggggtataacaaagtctgtctttaaaaagcaggggttagggagttgttcggtcataagcttcagcgcgaacgaccaactaccccgatcatcagttatccttaaggtctcttttgtgtggtgcgttccggtatggggggggctgccgccaggttgggggccgtgattttgtttgtcgtcatagtgggcctccatggggtccgcggcaaatatgccttggcggatgcctctctcaagatggccgaccccaatcgctttcgcggcaaagaccttccggtcctggaccagctgaccgaccctccgggggtccggcgcgtgtaccacatccaggcgggcctaccggacccgttccagccccccagcctcccgatcacggtttactacgccgtgttggagcgcgcctgccgcagcgtgctcctaaacgcaccgtcggaggccccccagattgtccgcggggcctccgaagacgtccggaaacaaccctacaacctgaccatcgcttggtttcggatgggaggcaactgtgctatccccatcacggtcatggagtacaccgaatgctcctacaacaagtctctgggggcctgtcccatccgaacgcagccccgctggaactactatgacagcttcagcgccgtcagcgaggataacctggggttcctgatgcacgcccccgcgtttgagaccgccggcacgtacctgcggctcgtgaagataaacgactggacggagattacacagtttatcctggagcaccgagccaagggctcctgtaagtacgccctcccgctgcgcatccccccgtcagcctgcctgtccccccaggcctaccagcagggggtgacggtggacagcatcgggatgctgccccgcttcatccccgagaaccagcgcaccgtcgccgtatacagcttgaagatcgccgggtggcacgggcccaaggccccatacacgagcaccctgctgcccccggagctgtccgagacccccaacgccacgcagccagaactcgccccggaagaccccgaggattcggccctcttggaggaccccgtggggacggtggcgccgcaaatcccaccaaactggcacataccgtcgatccaggacgccgcgacgccttaccatcccccggccaccccgaacaacatgggcctgatcgccggcgcggtgggcggcagtctcctggcagccctggtcatttgcggaattgtgtactggatgcgccgccgcactcaaaaagccccaaagcgcatacgcctcccccacatccgggaagacgaccagccgtcctcgcaccagcccttgttttactagatacccccccttaatgggtgcgggggggtcaggtctgcggggttgggatgggaccttaactccatataaagcgagtctggaaggggggaaaggcggacagtcgataagtcggtagcgggggacgcgcacctgttccgcctgtcgcacccacagctttttttgcgaaccgtcccgttccgggatgccgtgccgcccgttgcagggcctggtgctcgtgggcctctgggtctgtgccaccagcctggttgtccgtggccccacggtcagtctggtatcaaactcatttgtggacgccggggccttggggcccgacggcgtagtggaggaagacctgcttattctcggggagcttcgctttgtgggggaccaggtcccccacaccacctactacgatggggtcgtagagctgtggcactaccccatgggacacaaatgcccacgggtcgtgcatgtcgtcacggtgaccgcgtgcccacgtcgccccgccgtggctttcgccctgtgtcgcgcaaccgacagcactcacagccccgcatatcccaccctggagctgaatctggcccaacagccgcttttgcgggtccggagggcgacgcgtgactatgccggggtgtacgtgttacgcgtatgggtcggggacgcaccaaacgccagcctgtttgtcctggggatggccatagccgccgaagggactctggcgtacaacggctcggcccatggctcctgcgacccgaaactgcttccgtattcggccccgcgtctggccccggcgagcgtataccaacccgcccctaacccggcctccaccccctcgaccaccacctccaccccctcgaccaccacctccaccccctcgaccaccatccccgctccccaagcatcgaccacacccttccccacgggagacccaaaaccccaacctcacggggtcaaccacgaacccccatcgaatgccacgcgagcgacccgcgactcgcgatacgcgctaacggtgacccagataatccagatagccatccccgcgtccattatagccctggtgtttctggggagctgtatttgctttatacacagatgtcaacgccgctaccgacgctcccgccgcccgatttacaacccccagatacccactggcatctcatgcgcggtgaacgaagcggccatggcccgcctcggagccgagctcaaatcgcatccgagcaccccccccaaatcccggcgccggtcgtcacgcacaccaatgccctccctgacggccatcgccgaagagtcggagcccgcgggggcggctgggcttccgacgccccccgtggaccccacgacatccaccccaacgcctcccctgttggtataggtccacggccactggccgggggcaccacataaccgaccgcagtcactgagttgggaataaaccggtattatttacctatatacgtgtatgtccatttcttcccccccccccccggaaaccaaagaaggaaacaaagaatggatgggaggagttcaggaagccggggagagggcccgcggcgcatttaaggcgttgttgtgttgactttggctcttctggcgggttggtgcggtgctgtttgttgggctcccattttacccgaagatcggctgctatccccgggacatggatcgcggggcggtggtggggtttcttctcggtgtttgtgttgtatcgtgcttggcgggaacgcccaaaacgtcctggagacgggtgagtgtcggcgaggacgtttcgttgcttccagctccggggcctacggggcgcggcccgacccagaaactactatgggccgtggaacccctggatgggtgcggccccttacacccgtcgtgggtctcgctgatgccccccaagcaggtgcccgagacggtcgtggatgcggcgtgcatgcgcgctccggtcccgctggcgatggcgtacgcccccccggccccatctgcgaccgggggtctacggacggacttcgtgtggcaggagcgcgcggccgtggttaaccggagtctggttatttacggggtccgagagacggacagcggcctgtataccctgtctgtgggcgacataaaggacccggctcgccaagtggcctcggtggtcctggtggtgcaaccggccccagttccgaccccacccccgaccccagccgattacgacgaggatgacaatgacgagggcgagggcgaggacgaaagtctagccggcactcccgccagcgggaccccccggctcccgcctccccccgcccccccgaggtcttggcccagcgcccccgaagtctcacacgtgcgtggggtgaccgtgcgtatggagactccggaagctatcctgttttcccccggggaggcgtttagcacgaacgtctccatccatgccatcgcccacgacgaccagacctacaccatggacgtcgtctggttgaggttcgacgtgccgacctcgtgtgccgagatgcgaatatacgaatcgtgtctgtatcacccgcagctcccagagtgtctgtccccggccgacgctccgtgcgccgcgagtacgtggacgtctcgcctggccgtccgcagctacgcggggtgttccagaacaaaccccccgccgcgctgttcggccgaggctcacatggagcccttcccggggctggcgtggcaggcggcctccgtcaatctggagttccgggacgcgtccccacaacactccggcctgtatctgtgcgtggtgtacgtcaacgaccatattcacgcatggggccacattaccatcagcaccgcggcgcagtaccggaacgcggtggtggaacagcccctcccacagcgcggcgcggatttggccgagcccacccacccgcacgtcggggcccctccccacgcgcccccaacccacggcgccctgcggttaggggcggtgatgggggccgccctgctgctgtctgcgctggggttgtcggtgtgggcgtgtatgacctgttggcgcaggcgtgcctggcgggcggttaaaagcagggcctcgggtaaggggcccacgtacattcgcgtggccgacagcgagctgtacgcggactggagctcggacagcgagggagaacgcgaccaggtcccgtggctggcccccccggagagacccgactctccctccaccaatggatccggctttgagatcttatcaccaacggctccgtctgtatacccccgtagcgatgggcatcaatctcgccgccagctcacaacctttggatccggaaggcccgatcgccgttactcccaggcctccgattcgtccgtcttctggtaaggcgccccatcccgaggccccacgtcggtcgccgaactgggcgaccgccggcgaggtggacgtcggagacgagctaatcgcgatttccgacgaacgcggacccccccgacatgaccgcccgcccctcgccacgtcgaccgcgccctcgccacacccgcgacccccgggctacacggccgttgtctccccgatggccctccaggctgtcgacgccccctccctgtttgtcgcctggctggccgctcggtggctccggggggcttccggcctgggggccgtcctgtgtgggattgcgtggtatgtgacgtcaattgcccgaggcgcataaagggccggtggtccgcctagccgcagcaaattaaaaatcgtgagtcactgcgaccgcaacttcccacccggagctttcttccggcctcgatgacgtcccggctctccgatcccaactcctcagcgcgatccgacatgtccgtgccgctttatcccacggcctcgccagtttcggtcgaagcctactactcggaaagcgaagacgaggcggccaacgacttcctcgtacgcatgggccgccaacagtcggtattaaggcgtcgacgcagacgcacccgctgcgtcggcatggtgatcgcctgtctcctcgtggccgttctgtcgggcggatttggggcgctcctgatgtggctgctccgctaaaagaccgcatcgacacgcgcgtccttcttgtcgtctctcttcccccccatcaccccgcaatttgcacccagcctttaactacattaaattgggttcgattggcaatgttgtctcccggttgatttttgggtgggtggggagtgggtgggtggggagtgggtgggtggggagtgggtgggtggggagtgggtgggtggggagtgggtgggtggggagtgggtgggtggggagtgggtgggtggggagtgggtgggtggggagtgggtgggtggggagtggcaaggaagaaacaagcccgaccaccagacagaaaatgtaaccatacccaaaccgactctgggggctgtttgtggggtcggaaccataggatgaacaaaccaccccgtacctcccgcacccttgggtgcgggtggctcatcggcatctgtccggtatgggttgttccccacccacttgcgttcggacgtcttagaatcatggcggttttctatgccgacatcggttttctcccccgcaataagacacgatgcgataaaatctgtttgtgaaatttattaagggtacaaattgccctagcacaggggtggggttagggccgggtccccacacccaaacgcaccaaacagatgcaggcagtgggtcgagtacagccccgcgtacgaacacgtcgatgcgtgtgtcagacagcaccagaaagcacaggccatcaacaggtcgtgcatatgtcggtgggtttggacgcggggggccatggtggtgataaagttaatggccgccgtccgccagggccacaggggcgacgtctcttggttggcccggagccactgggtgtggaccagccgcgcgtggcggcccaacatggcccctgtagccgggggcgggggatcgcgcacgtttgcagcgcacatgcgagacacctcgaccacggttcggaagaaggcccggtggtccgcgggcaacatcaccaggtgcgcaagcgcccgggcgtccagagggtagagccctgagtcatccgaggttggctcatcgcccgggtcatgccgcaagtgcgtgtgggttgggcttccggtgggcgggacgcgaaccgcggtgtggagccctacgcgggcccgagcgtacgctccatcttgtggggagaaggggtctgggctcgccaggggggcatacttgcccgggctatacagacccgcgagccgtacgtggttcgcggggggtgcgtggggtccggggctcccggggaggccggggctcccggggttgtcgtggatccctggggtcacgcggtaccctggggtctctgggagctcgcggtactctgggttccctaggttctcggggtggtcgcggaacccggggctcccggggaacacgcggtgtcctggggattgttggcggtcggacggcttcagatggcttcgagatcgtagtgtccgcaccgactcgtagtagacccgaatctccacattgccccgccgcttgatcattatcaccccgttgcgggggtccggagatcatgcgcgggtgtcctcgaggtgcgtgaacacctctggggtgcatgccggcggacggcacgccttttaagtaaacatctgggtcgcccggcccaactggggccgggggttgggtctggctcatctcgagagccacggggggaaccaccctccgcccagaaacttgggcgatggtcgtacccgggactcaacgggttaccggattacggggactgtcggtcacggtcccgccggttcttcgatgtgccacacccaaggatgcgttgggggcgattttgggcagcagcccgggagagcgcagcagaggacgctccgggtcgtgcacggcggttttggccgcctcccggtcctcacgcccccttttattgatctcatcgcgtacgtcggcgtacgtcctgggcccaacccgcatgttgtccaggaaggtgtccgccatttccagggcccacgacatgctcccccgcccgacgagcaggaagcggtccacgcaacggtcgccgccggtcgccccgacgagcaggaagcggtccacgcaacggtcgccgccggtcgcctcgacgaggacgttcctcctgcgggaaggcacgaacgcgggtgagccccctcctccgcccccgcgtcccccctcctccgcccccgcgtcccccctcctccgcccccgcgtcccccctcctccgcccccgcgtcccccctcctccgcccccgcgtcccccctcctccgcccccgcgtcccccctcctccacccccgcgtccccccctcctccgcccacccaaggtgcttacccgtgcacaaaggcggaccggtgggtttctgtcgtcggaggcccccggggtgcgtcccctgtgtttcgtgggtggggtgggtgggtctttccgcgtgtccctttccgatgcgatcccgatcccgagccggggcgtcgcgatgccgacgccgtccgctccgacggccctctgcgagtcccgctcccggtccgcgtgctccgcagccgctcccgtcgttcgtggccggcgccgtctgcgggcgtcggtcgcgccgggcctttatgtgcgccggagagacccgccccccgccgcccgggcccgcccccggggccggcgcggagtcgggcacggcgccagtgctcgcacttcgccctaataatatatatatattgggacgaagtgcgaacgcttcgcgttctcacttcttttacccggcggccccgcccccttggggcggtcccgcccgccggccaatgggggggcggcaaggcgggcggcccttgggccgcccgccgtcccgttggtcccaacgtccggcgggcgggaccgggggcccggggacggccaacgggcgcgcggggctcgtatctcattaccgccgaaccgggaagtcggggcccgggccccgcccccggcccgttcctcgttagcatgcggaacggaagcggaaaccaccggatcgggcggtaatgagatgccatgcggggcggggcgcgggcccacccgccctcgcgccccgcccatggcagatggcgcggatgggcggggccgggggttcgaccaacgggccgcggccacgggcccccggcgtgccggcgtcggggcggggtcgtgcataatggaattccgttcggggcgggcccgcctggggggcggggggccggcggcctccgctgctcctccttcccgccggcccctgggactatatgagcccgaggacgccccgatcgtccacacggagcgcggctgccgacacggatccacgacccgacgcgggaccgccagagacagaccgtcagacgctcgccgcgccgggacgccgatacgcggacgaagcgcgggagggggatcggccgtccctgtcctttttcccacccaagcatcgaccggtccgcgctagttccgcgtcgacggcgggggtcgtcggggtccgtgggtctcgccccctccccatcgagagtccgtaggtgacctaccgtgctacgtccgccgtcgcagccgtatccccggaggatcgccccgcatcggcgatggcgtcggagaacaagcagcgccccggctccccgggccccaccgacgggccgccgcccaccccgagcccagaccgcgacgagcggggggccctcgggtggggcgcggagacggaggagggcggggacgaccccgaccacgaccccgaccacccccacgacctcgacgacgcccggcgggacgggagggcccccgcggcgggcaccgacgccggcgaggacgccggggacgccgtctcgccgcgacagctggccctgctggcctccatggtagaggaggccgtccggacgatcccgacgcccgaccccgcggcctcgccgccccggacccccgcctttcgagccgacgacgatgacggggacgagtacgacgacgcagccgacgccgccggcgaccgggccccggcccggggccgcgcacgggaggccccgctacgcggcgcgtatccggaccccacggaccgcctgtcgccgcgcccgccggcccagccgccgcggagacgtcgtcacggccggcggcggccatcggcgtcatcgacctcgtcggactccgggtcctcgtcctcgtcgtccgcatcctcttcgtcctcgtcgtccgacgaggacgaggacgacgacggcaacgacgcggccgaccgcgcacgcgaggcgcgggccgtcgggcggggtccgtcgagcgcggcgccggaagcccccgggcggacgccgcccccgcccgggccaccccccctctccgaggccgcgcccaagccccgggcggcggcgaggacccccgcggcctccgcgggccgcatcgagcgccgccgggcccgcgcggcggtggccggccgcgacgccacgggccgcttcacggccgggcagccccggcgggtcgagctggacgccgacgcggcctccggcgccttctacgcgcgctatcgcgacgggtacgtcagcggggagccgtggcccggcgccgggcccccgcccccggggcgggtgctgtacggcggcctgggcgacagccgcccgggcctctggggggcgcccgaggcggaggaggcgcgacgccggttcgaggcctcgggcgccccggcggccgtgtgggcgcccgagctgggcgacgccgcgcagcagtacgccctgatcacgcggctgctgtacaccccggacgcggaggccatggggtggctccagaacccgcgcgtggtccccggggacgtggcgctggaccaggcctgcttccggatctcgggcgccgcgcgcaacagcagctccttcatcaccggcagcgtggcgcgggccgtgccccacctgggctacgccatggcggccggccgcttcggctggggcctggcgcacgcggcggccgccgtggccatgagccgccgatacgaccgcgcgcagaagggcttcctgctgaccagcctgcgccgcgcctacgcgcccctgttggcgcgcgagaacgcggcgctgacgggggccgcggggagccccggcgccggcgcagatgacgagggggtcgccgccgccgtcgtcgccgccgccgccgcaccgggcgagcgcgcggtgcccgccgggtacggcgccgcggggatcctcgccgccctggggcggctgtccgccgcgcccgcctcccccgcggggggcgacgaccccgacgccgcccgccacgccgacgccgacgacgacgccgggcgccgcgcccaggccggccgcgtggccgtggagtgcctggccgcctgccgcgggatcctggaggcgctggccgagggcttcgacggcgacctggcggccgtcccggggctggccggggcccggcccgccagccccccgcggccggagggacccgcgggccccgcttccccgccgccgccgcacgccgacgcgccccgcctgcgcgcgtggctgcgcgagctgcggttcgtgcgcgacgcgctggtgctcatgcgcctgcgcggggacctgcgcgtggccggcggcagcgaggccgccgtggccgccgtgcgcgccgtgagcctggtcgccggggccctgggccccgcgctgccgcgggacccgcgcctgccgagctccgcggccgccgccgccgcggacctgctgtttgagaaccagagcctgcgccccctgctggcggcggccgccagcgcaccggacgccgccgacgcgctggcggccgccgccgcctccgccgcgccgcgggaggggcgcaagcgcaagagtcccggcccggcccggccgcccggaggcggcggcccgcgacccccgaagacgaagaagagcggcgcggacgcccccggctcggacgcccgcgcccccctccccgcgcccccctccacgcccccggggcccgagcccgcccccgcccagcccgcggcgccccgggccgccgcggcgcaggcccgcccgcgccccgtggcgctgtcgcgccggcccgccgagggccccgaccccctgggcggctggcggcggcagcccccggggcccagccacacggcggcgcccgcggccgccgccctggaggcctactgctccccgcgcgccgtggccgagctcacggaccacccgctgttccccgtcccctggcgaccggccctcatgtttgacccgcgggccctggcctcgatcgccgcgcggtgcgccgggcccgccgccgccgcccaggccgcgtgcggcggcggcgacgacgacgataacccccacccccacggggccgccgggggccgcctctttggccccctgcgcgcctcgggcccgctgcgccgcatggcggcctggatgcgccagatccccgaccccgaggacgtgcgcgtggtggtgctgtactcgccgctgccgggcgaggacctggccggcggcggggcctcgggggggccgccggagtggtccgccgagcgcggcgggctgtcctgcctgctggcggccctggccaaccggctgtgcgggccggacacggccgcctgggcgggcaactggaccggcgcccccgacgtgtcggcgctgggcgcgcagggcgtgctgctgctgtccacgcgggacctggccttcgccggggccgtggagtttctggggctgctcgccagcgccggcgaccggcggctcatcgtggtcaacaccgtgcgcgcctgcgactggcccgccgacgggcccgcggtgtcgcggcagcacgcctacctggcgtgcgacctgctgcccgccgtgcagtgcgccgtgcgctggccggcggcgcgggacctgcgccgcacggtgctggccccgggccgcgtgttcggcccgggggtcttcgcgcgcgtggaggccgcgcacgcgcgcctgtaccccgacgcgccgccgctgcgcctgtgccgcggcggcaacgtgcgctaccgcgtgcgcacgcgcttcggcccggacacgccggtgcccatgtccccgcgcgagtaccgccgggccgtgctgccggcgctggacggccgggcggcggcctcggggaccaccgacgccatggcgcccggcgcgccggacttctgcgaggaggaggcccactcgcaccgcgcctgcgcgcgctggggcctgggcgcgccgctgcggcccgtgtacgtggcgctggggcgcgaggcggtgcgcgccggcccggcccggtggcgcgggccgcggagggacttttgcgcccgcgccctgctggagcccgacgacgacgcccccccgctggtgctgcgcggcggcgacgacgacgacgacggcccgggggccctgccgccggcgttgcccgggattcgctgggcctcggccacgggccgcagcggcaccgtgctggcggcggcgggggccgtggaggtgctgggggcggaggcgggcttggccacgcccccgcgacgggaagttgtggactgggaaggcgcctgggacgacgacgacggcggcgcgttcgagggggacggggtgctgtaacgggccgggacggggcggggcgcttgcgaaacccgaagacgcaataaacgacaacgacctgatttagttttgcagtagcgttgtttatttcgaggggcgggagggggcgaggggcgggagggggcgaggggcgggagggggcgaggggcgggagggggcgaggggcgggagggggcgaggggcgggagggggcgaggggcgggagggggcgaggggcgggagggggcgaggggcgggagggggcgaggggcgggagggggcgaggggcgggagggggcgaggggcgggagggggcgaggggcgggagggggcgaggggcgggagggggcgaggggcgggagggggcgaggggcgggagggggcgaggggcgggagggggcgaggggcgggagggggcgaggggcgggagggggcgaggggcggtggtggtgcgcgggcgcccccggagggtttggatctctgacctgagattggcggcactgaggtagagatgcccgaacccccccgagggagcgcgggacgcggccggggagggctggggccggggagggctggggccggggagggctggggccggggagggctggggccggggagggctggggccggggagggctggggccggggagggctggggctggggagggctggggctggggagggctggggcggtggtgtgtgacaggagcggcgtgttgcgctgggggacgtctggaggagcggggggtgcgcggtgacgtgtggatgaggaacaggagttgttgcgcggtgagttgtcgctgtgagttgtgttggtgggcaggtgtggtggatgacgtgacgtgtgacgtgtggatgaggaaccggagtcgccggtgcgccgtgctgttggtgttctgttggtgttgttacacctgtggcagcccgggccccccgcgggcggggcggcgcgcaaaaaaggcgggcggcggtccgggcggcgtgcgcgcgcgcggcgggcgttgggggagcggggggaggagcggggggaggagcggggggaggagcggggggaggagcggggggaggagcggggggaggagcggggggaggagcggggggaggagcggggggaggagcggggggaggagcggggggaggagcggggggaggagcggggggaggagcggggggaggagcggggggaggagcggggggaggagcggggggaggagcggggggaggagcggaaaacgggccccccccgaaacacaccccccgggggtcgcgcgcggccctttaaagcg

SEQ ID NO: 6 - DNA, 162624 bp, Artificial Sequence
  C171_from HSV-C134 Complete Viral Genome v1 Chimeric HSV expressing EphA2-Full-MLM
agcccgggccccccgcgggcggggcggcgcgcaaaaaaggcgggcggcggtccgggcggcgtgcgcgcgcgcggcgggcgttggggagcggggggaggagcggggggaggagcggggggaggagcggggggaggagcggggggaggagcggggggaggagcggggggaggagcggggggaggagcggggggaggagcggggggaggagcggggggaggagcggggggaggagcggggggaggagcggggggaggagcggggggaggagcggggggaggagcggggggaggagcggggggaggagcggaaaacgggccccccccgaaacacaccccccgggggtcgcgcgcggccctttaaagcgcggcggcgcagcccgggccccccgcggccgagacgagcgagttagacaggcaagcactactcgcctctgcacgcacatgcttgcctgtcaaactctaccaccccggcacgctctctgtctccatggcccgccgccgccgccatcgcggcccccgccgcccccggccgcccgggcccacgggcgccgtcccaaccgcacagtcccaggtaaccgcctatgggaatgaaagaccccacctgtaggtttggcaagctaggatcaaggtcaggaacagagaaacaggagaatatgggccaaacaggatatctgtggtaagcagttcctgccccgctcagggccaagaacagttggaacaggagaatatgggccaaacaggatatctgtggtaagcagttcctgccccgctcagggccaagaacagatggtccccagatgcggtcccgccctcagcagtttctagagaaccatcagatgtttccagggtgccccaaggacctgaaatgaccctgtgccttatttgaactaaccaatcagttcgcttctcgcttctgttcgcgcgcttctgctccccgagctctatataagcagagctggtttagtgaaccgtcagatcgcctggagacgccatccacgctgttttgacctccatagaagacaccgactctagctagaggatctcctaggaagctggccgcacaaagtggtaccggatcccgggtcgaccatggagctccgggcagtcggtttctgcctggcgctgctgtggggttgcgcgctggcggccgcggcggcacagggaaaggaagttgttttgttggacttcgcagcaatgaagggagagctcggctggctcacgcacccctatggcaaagggtgggacctgatgcagaacatcatggacgacatgcctatctacatgtactcggtgtgcaacgtggtatccggcgaccaggacaactggctccgcaccaactgggtgtaccgggaggaggccgagcgcatctttattgagctcaagttcacggtgcgagactgtaacagcttcccgggtggcgccagctcatgcaaagagaccttcaacctctactatgcagagtcagatgtggactatggcaccaacttccagaagcgccagttcaccaagattgacaccatcgcccctgacgagatcacggtcagcagtgacttcgaggctcgcaatgtcaagctgaacgtagaggagcgcatggtggggccccttacccggaagggcttctacctggccttccaggacatcggcgcctgcgtggcgctgctctccgttcgcgtctactacaagaagtgtcccgagatgctgcagagcttggctcgcttccccgagaccattgctgtcgctgtctccgatacacaacccctggccacggtggccggtacctgcgtggaccatgccgtggtgccttatgggggcgaggggcctctcatgcactgcacggtggatggcgagtggctggtgcccatcgggcagtgcctgtgccaggaaggctacgagaaggtcgaggatgcctgccgagcctgttctccaggattcttcaagtctgaggcatctgagagcccttgcctggagtgtccagagcataccctgccatccacagagggtgccacctcctgccagtgtgaagaaggctatttcagggcacctgaggacccactgtccatgtcttgcacacgtccaccctctgcccccaactacctcacggccattggcatgggtgccaaagtagaactgcgttggacagctcccaaggacactggtggccgccaggacattgtctacagtgtcacttgcgaacagtgctggccagagtctggcgagtgtgggccctgtgaggcgagcgtgcgctattcagaacctcctcacgccctgacccgcacgagtgtgacagtcagtgacctggagccccacatgaactataccttcgctgtcgaagcacgcaatggtgtctcaggcctggtgactagccgaagcttccggactgccagcgtcagtattaaccaaacagagccccccaaagtgaggctggaggaccgaagcaccacctccctgagtgtcacctggagcatcccggtgtcacagcagagccgtgtgtggaagtacgaagtcacctaccgcaagaagggggatgccaacagctataatgtgcgccgcacggaaggcttctccgtgaccctggatgaccttgctccggataccacgtacctggtgcaggtgcaggcgctgacgcaggagggccagggagccggcagcaaagtgcacgagttccagacactgtccacggaaggatctgccaacatggcggtgatcggcggtgtggctgtaggtgttgttttgcttctggtactggcaggagttggcctcttcatccatcgaaggaggaggaacctgcgggctcgccagtcctctgaggatgtccgtttttccaagtcagaacaactaaagcccctgaagacctatgtggatcctcacacttacgaagaccccaaccaggctgtactcaagtttaccaccgagatccacccatcctgtgtggcaaggcagaaggtcattggagcaggagagtttggagaggtctataaagggacgctgaaggcatcctcggggaagaaggagataccggtggccatcaagacactgaaagcgggctacactgagaagcagcgggtggacttcctgagcgaggccagcatcatgggccagtttagccaccacaatatcatccgcctggagggcgtggtctctaaatacaaacccatgatgattatcacagagtacatggagaatggagcgctagacaagttccttagggagaaggatggtgagttcagtgtacttcagttggtgggcatgctgaggggtatcgcatccggcatgaagtacctggccaacatgaactacgtgcaccgggacctggccgcccgcaacatcctcgtcaacagcaacctggtgtgcaaggtgtccgattttggcctgtcgcgtgtgctggaagatgaccccgaggccacctacaccacaagtggcggcaagatccctattcgatggacagccccagaggccatttcctaccgcaagttcacctcagccagcgatgtgtggagctacggcattgtcatgtgggaagtgatgacttatggcgaacggccctactgggaactgtcaaaccacgaggtcatgaaagccatcaacgacggcttccggctccctacgcccatggactgcccttcagccatttaccagctcatgatgcagtgctggcagcaagagcgctcccgccgacccaagtttgccgacatcgttagcatcctggacaagctcatccgagcccccgactccctcaagacgctggctgactttgatccccgagtgtccatccggctgcccagcaccagcggctcggagggagtccccttccgtacggtgtccgagtggctggagagcatcaagatgcaacagtacacggaacacttcatggtggctggctacacggccatcgagaaggtggtacagatgtccaacgaagacatcaaaaggatcggagtgcgtcttcctggccaccagaagcgtattgcctacagcctgctgggactcaaggaccaggtcaacacagtggggattcctatcgggaattcagaacaaaaactcatctcagaagaagatctaggaggcggcgggtcaggtggaggtggctctggcggtggcggttcttgttggacgctggatcgggggtattgctcctaattccgactcactatagggcgaattaattccggagatctctagatccggagagacgatggcaggagccgcgcatatatacgcttggagccagcccgccctcacagggcgggccgcctcgggggcgggactggccaatcggcggccgccagcgcggcggggcccggccaaccagcgtccgccgagtcttcggggcccggcccattgggcgggagttaccgcccaatgggccgggccgcccacttcccggtatggtaattaaaaacttgcaagaggccttgttccgcttcccggtatggtaattagaaactcattaatgggcggccccggccgcccttcccgcttccggcaattcccgcggcccttaatgggcaaccccggtattccccgcctcccgcgccgcgcgtaaccactcccctggggttccgggttatgctaattgcttttttggcggaacacacggcccctcgcgcattggcccgcgggtcgctcaatgaacccgcattggtcccctggggttccgggtatggtaatgagtttcttcgggaaggcgggaagccccggggcaccgacgcaggccaagcccctgttgcgtcggtgggaggggcatgctaatggggttctttgggggacaccgggttggtcccccaaatcgggggccgggccgtgcatgctaatgatattctttgggggcgccgggttggtccccggggacggggccgccccgcggtgggcctgcctcccctgggacgcgcggccattgggggaatcgtcactgccgcccctttggggaggggaaaggcgtggggtataagttagccctggcccgacagtctggtcgcatttgcacctcggcactcggagcgagacgcagcagccaggcagactcgggccgccccctctccgcatcaccacagaagccccgcctacgttgcgacccccagggaccctccgtccgcgaccctccaaccgcatacgacccccatggagccccgccccggagcgagtacccgccggcctgagggccgcccccagcgcgaggtgaggggccgggcgccatgtctggggcgccatattggggggcgccatattggggggcgccatgttgggggacccccgacccttacactggaaccggccgccatgttgggggacccccactcatacacgggagccgggcgccatgttagggggcgtggaaccccgtgacactatatatacagggaccgggggcgccatgttagggggcgcggaaccccctgaccctatatatacagggaccggggtcgccctgttgggggtcgccatgtgaccccctgactttatatatacagaccccccaacacatacacatggcccctttgactcagacgcagggcccggggtcgccgtgggaccccctgactcatacacagagacacgcccccacaacaaacacacagggaccggggtcgccgtgttagggggcgtggtccccactgactcatacgcagggcccccttactcacacgcatctaggggggtggggaggagccgcccgccatatttgggggacgccgtgggacccccgactccggtgcgtctggagggcgggagaagagggaagaagaggggtcgggatccaaaggacggacccagaccacctttggttgcagacccctttctcccccctcttccgaggccagcaggggggcaggactttgtgaggcggggggggggagagggggaactcgtgggcgctgattgacgcgggaaatccccccattcttacccgcccccctttttttccccttagcccgccccggatgtctgggtgtttccctgcgaccgagacctgccggacagcagcgactctgaggcggagaccgaagtgggggggcggggggacgccgaccaccatgacgacgactccgcctccgaggcggacagcacggacacggaactgttcgagacggggctgctggggccgcagggcgtggatgggggggcggtctcgggggggagccccccccgcgaggaagaccccggcagttgcgggggcgccccccctcgagaggacggggggagcgacgagggcgacgtgtgcgccgtgtgcacggatgagatcgcgccccacctgcgctgcgacaccttcccgtgcatgcaccgcttctgcatcccgtgcatgaaaacctggatgcaattgcgcaacacctgcccgctgtgcaacgccaagctggtgtacctgatagtgggcgtgacgcccagcgggtcgttcagcaccatcccgatcgtgaacgacccccagacccgcatggaggccgaggaggccgtcagggcgggcacggccgtggactttatctggacgggcaatcagcggttcgccccgcggtacctgaccctgggggggcacacggtgagggccctgtcgcccacccaccctgagcccaccacggacgaggatgacgacgacctggacgacggtgaggcgggggggcggcgaggaccctgggggaggaggaggaggaggggggagggaggaataggcgggcgggggggcgaggaaagggcgggcgcggaaagggagggcctgggagggggcgtaacctgatcgcgccccccgttgtctcttgcagcagactacgtaccgcccgccccccgccggacgccccgcgcccccccacgcagaggcgccgccgcgccccccgtgacgggcggggcgtctcacgcagccccccagccggccgcggctcggacagcgcccccctcggcgcccatcgggccacacggcagcagtaacaccaacaccaccaccaacagcagcggcggcggcggcggctcccgccagtcgcgagccgcggcgccgcggggggcgtctggcccctccgggggggttggggttggggttggggttgttgaagcggaggcggggcggccgaggggccggacgggcccccttgtcaacagacccgccccccttgcaaacaacagagaccccatagtgatcagcgactcccccccggcctctccccacaggccccccgcggcgcccatgccaggctccgccccccgccccgggcccaccgcgtcctcggccgcgtcgggacccgcgcgcccccgcgcggccgtggccccgtgcgtgcgagcgccgcctccggggcccggcccccgcgccccggcccccgcggacgcgcgccgtgtgccccagtcgcactcgtccctggctcaggccgcgaaccaagaacagagtctgtgccgggcgcgtgcgacggtggcgcgcggctcgggggggccgggcgtggagggtggacacgggccctcccgcggcgccgccccctccggcgcccccccgctcccctccgccgcctctgtcgagcaggaggcggcggtgcgtccgaggaagaggcgcgggtcgggccaggaaaacccctccccccagtccacgcgtccccccctcgcgccggcaggggccaagagggcggcgacgcaccccccctccgactcagggccgggggggcgcggccagggtgggcccgggacccccctgacgtcctcggcggcctccgcctcttcctcctctgcctcttcctcctcggccccgactcccgcgggggccgcctcttccgccgccggggccgcgtcctcctccgcttccgcctcctcgggcggggccgtcggtgccctgggagggagacaagaggaaacctccctcggcccccgcgctgcttctgggccgcgggggccgaggaagtgtgcccggaagacgcgccacgcggagacttccggggccgcccccgcgggcggcctcacgcgctacctgcccatctcgggggtctctagcgtggtcgccctgtcgccttacgtgaacaagacgatcacgggggactgcctgcccatcctggacatggagacggggaacatcggggcgtacgtggtcctggtggaccagacgggaaacatggcgacccggctgcgggccgcggtccccggctggagccgccgcaccctgctccccgagaccgcgggtaaccacgtgatgccccccgagtacccgacggcccccgcgtcggagtggaacagcctctggatgacccccgtggggaacatgctgttcgaccagggcaccctagtgggcgccctggacttccgcagcctgcggtctcggcacccgtggtccggggagcagggggcgtcgacccgggacgagggaaaacaataagggacgccccccgtgtttgtggggaggggggggtcgggcgctgggtggtctctggccgcgcccactacaccagccaatccgtgtcggggaggggaaaagtgaaagacacgggcaccacacaccagcgggtctttagtgttggccctaataaaaaactcaggggatttttgctgtctattgggaaataaaggtttacttttgtatcttttccctgtctgtgttggatggatctcgggggtgcgtgggagtgggggtgcgtgggagtgggggtgcgtgggagtgggggtgcgtgggagtgggggtgcgtgggagtgggggtgcgtgggagtgggggtgcgtgggagtgggggtgcgtgggagtgggggtgcgtgggagtgggggtgccatgttgggcaggctctggtgttaaccacagagccgcggcccgggctgcctgaccaccgatccccgaaagcatcctgccactggcatggagccagaaccacagtgggttgggtgtgggtgttaagtttccgcgagcgcctgcccgcccggactgacctggcctctggccgccacaaagggcgggggggggttaactacactatagggcaacaaaggacgggaggggtggcggggcgggacggggcgcccaaaagggggtcggccacaccacagacgtgggtgttggggggtggggcggaggggtggggggggagacagaaacaggaacatagttagaaaacaagaatgcggtgcagccagagaatcacaggagacgaggggatgggcgtgttggttaccaacccacacccaggcatgctcggtggtatgaaggagggggggcggtgcttcttagagaccgccgggggacgtggggttggtgtgcagaggcacgcgcacccgcgtcggccaggtgggccggtaccccatcccccctcccccgacccttcccacccccgcgtgccagagatcaccccggtcccccggcacccgccactcctccatatcctcgctttaggaacaactttagggggggtacacacgcgccgtgcatttccttccacaccccccctcccccgcactcccccccccccggcagtaagacccaagcatagagagccaggcacaaaaacacaggcggggtgggacacatgccttcttggagtacgtgggtcattggcgtggggggttacagcgacaccggccgaccccctggcggtcttccagccggcccttagataagggggcagttggtggtcggacgggtaagtaacagagtctgactaagggtgggagggggggaaaagaacgggctggtgtgctgtaacacgagcccacccgcgagtggcgtggccgaccttagcctctggggcgccccctgtcgtttgggtcccccccctctattggggagaagcaggtgtctaacctacctggaaacgcggcgtctttgttgaaccacaccggggcgcccttgacgagtgggataacgggggaggaagggagggaggagggtactgggggtgaagaaggggggggggggagaagcgagaacaggaaaggcgacggagcccgacaaaacaccgagaaaaaaaaaccacagcgcatgcgccgggccgttgtggggccccgggccggggccccttgggtccgccggggccccgggccgggccgccacgggggccggccgttggcggtaaccccgattgtttatctcaggccccgggccgggaacccggaaaagcctccggggggcctttttcgcgtcgcgtgccggcgagcgggcccggacggggcccggaccgccgcggtcgggggccccctcgtcccgggccgtacgcggccttcgccccgtgaggggacagacgaacgaaacattccggcgacggaacgaaaaacaccccagacgggttaaagaaacagaaaccgcaaccccccccacccccgaaacggggaaaacaaaaaacagaccagcggccggccggcgcttagggggaggatgtcgccgacgccccttggccgccccggctgcaggggggcccggagagccgcggcacccggacgcgcccggaaagtctttcgcaccacccgcgatcggcacggccgcgcccccgcttttataaaggctcagatgacgcagcaaaaacaggccacagcaccacgtgggtaggtgatgtaattttattttcctcgtctgcggcctaatggatttccgggcgcggtgcccctgtctgcagagcacttaacggattgatatctcgcgggcacgcgcgcccttaatggaccggcgcggggcggggggccggatacccacacgggcgggggggggggtgtcgcgggccgtctgctggcccgcggccacataaacaatgactctgggcctttctgcctctgccgcttgtgtgtgcgcgcgccggctctgcggtgtcggcggcggctgcggcggctgcggcggccgccgtgttcggtctcggtagccggccggcgggtggactcgcggggggccggagggtggaaggcaggggggtgtaggatgggtatcaggacttccacttcccgtccttccatcccccgttcccctcggttgttcctcgcccccccccacaccccgccgctttccgttggggttgttattgttgtcgggatcgtgcgggccgggggtcgccggggcaggggcgggggcgggggtgctcgtcgatcgaccgggctcagtgggggcgtggggtgggggggaaaaggcgaagagactgggggtgggggggggtgtcgggggtggctgtttttttttgtgggtgttttttgtggctgttcccgtcccccgtcacccccctccctccgtccccccgtcgcgggtgtttgtgtttgtttattccgacatcggtttatttaaataaacacagccgttctgcgtgtctgttcttgcgtgtggctgggggcttatatgtggggtcccgggggcgggatggggtttagcggcggggggcggcgcgccggacggggcgctggagataacggcccccggggaacgggggaccggggctgggtctcccgaggtgggtgggtgggcggcggtggccgggccgggccgggccgggtgggcggggtttggaaaaacgaggaggaggaggaggagaaggagggggggggagacggggggaaagcaaggacacggcccggggggtgggagcgcgggccgggccgctcgtaagagccgcgacccggccgccggggagcgttgtcgccgtcggtctgccggcccccgtccctcccttttttgaccaaccagcgcccccccccctcaccaccattcctaccaccaccaccaccaccgacacctcccgcacacccccgcccacactccccccccccacccaacccgcaccacgagcacgggttgggggtagcaggggatcaaaggggggcaaggccggcggggcggttcgggggcgggggcgggagaccgagtaggccccgcccatccgcggcccctcccggcagccacgccccccagcgtcgggtgtcacggggaaagagcagggggagaggggagagggggggagaggggagagggggggagaggggagagggggggagaggggagagggggggagaggggagagggggggagaggggagagggggggagaggggagagggggggagaggggagagggggggagaggggagagggggggagaggggagagggggggagagggggtatataaaccaacgaaaagcgcgggaacggggatacggggcttgtgtggcacgacgtcgtggttgtgttactgggcaaacacttggggactgtaggtttctgtgggtgccgaccctaggcgctatggggattttgggttgggtcgggcttattgccgttggggttttgtgtgtgcgggggggcttgtcttcaaccgaatatgttattcggagtcgggtggctcgagaggtgggggatatattaaaggtgccttgtgtgccgctcccgtctgacgatcttgattggcgttacgagaccccctcggctataaactatgctttgatagacggtatatttttgcgttatcactgtcccggattggacacggtcttgtgggataggcatgcccagaaggcatattgggttaacccctttttatttgtggcgggttttttggaggacttgagtcaccccgcatttcctgccaacacccaggaaacagaaacgcgcttggccctttataaagagatacgccaggcgctggacagtcgcaagcaggccgccagccacacacctgtgaaggctgggtgtgtgaactttgactattcgcgcacccgccgctgtgtagggcgacaggatttgggacctaccaacggaacgtctggacggaccccggttctgccgccggacgatgaagcgggcctgcagccgaagcccctcaccacgccgccgcccatcatcgccacgttggaccccaccccgcgacgggacgccgccgcaaaaagcagacgccgacgaccccactcccggcgcatctaatgatgccgcgacggaaacccgtccgggttcggggggcgaaccggccgcctgtcgctcgtcagggccggcgggcgctcctcgccgccctagaggctgtcccgctggtgtgacgttttcctcgtccgcgccccccgaccctcccatggatttaacaaacgggggggtgtcgcctgtggcgacctcggcgcctctggactggaccacgtttcggcgtgtgtttctgatcgacgacgcgtggcggcccctgttggagcctgagctggcgaaccccttaaccgcccacctcctgaccgaatataatcgtcggtgccagaccgaagaggtgctgccgccgcgggaggatgtgttttcgtggactcgttattgcacccccgacgaggtgcgcgtggttatcatcggccaggacccatatcaccaccccggccaggcgcacggacttgcgtttagcgtgcgcgcgaacgtgccgcctcccccgagtcttcggaatgtcttggcggccgtcaagaactgttatcccgaggcacggatgagcggccacggttgcctggaaaagtgggcgcgggacggcgtcctgttactaaacacgaccctgaccgtcaagcgcggggcggcggcgtcccactctagaatcggttgggaccgcttcgtgggcggagttatccgccggttggccgcgcgccgccccggcctggtgtttatgctctggggcgcacatgcccagaatgccatcaggccggaccctcgggtccattgcgtcctcaagttttcgcacccgtcgcccctctccaaggttccgttcggaacatgccagcatttcctcgtggcgaatcgatatctcgagacccggtcgatttcacccatcgactggtcggtttgaaaggcatcgacgtccggggttttcgtctgtgggggcttttgggtatttccgatgaataaagacggttaatggttaaacctctggtctcatacgggtcggtgatgtcgggcgtcgggggagagggagttccctctgcgcttgcgattctagcctcgtggggctggacgttcgacacgccaaaccacgagtcagggatatcgccagatacgactcccgcagattccattcggggggccgctgtggcctcacctgaccaacctttacacgggggcccggaacgggaggccacagcgccgtctttctccccaacgcgcgcggatgacggcccgccctgtaccgacgggccctacgtgacgtttgataccctgtttatggtgtcgtcgatcgacgaattagggcgtcgccagctcacggacaccatccgcaaggacctgcggttgtcgctggccaagtttagcattgcgtgcaccaagacctcctcgttttcgggaaacgccccgcgccaccacagacgcggggcgttccagcgcggcacgcgggcgccgcgcagcaacaaaagccttcagatgtttgtgttgtgcaaacgcacccacgccgctcgagtgcgagagcagcttcgggtcgttattcagtcccgcaagccgcgcaagtattacacgcgatcttcggacgggcggctctgccccgccgtccccgtgttcgtccacgagttcgtctcgtccgagccaatgcgcctccaccgagataacgtcatgctggcctcgggggccgagtaaccgcccccccgcgccaccctcactgcccgtcgcgcgtgtttgatgttaataaataacgcataaattatcttaatagatctcccgatcccctatggtgcactctcagtacaatctgctctgatgccgcatagttaagccagtatctgctccctgcttgtgtgttggaggtcgctgagtagtgcgcgagcaaaatttaagctacaacaaggcaaggcttgaccgacaattgcatgaagaatctgcttagggttaggcgttttgcgctgcttcgcgatgtacgggccagatatacgcgttgacattgattattgactagttattaatagtaatcaattacggggtcattagttcatagcccatatatggagttccacgttacataacttacggtaaatggcccgcctggctgaccgcccaacgacccccgcccattgacgtcaataatgacgtatgttcccatagtaacgccaatagggactttccattgacgtcaatgggtggagtatttacggtaaactgcccacttggcagtacatcaagtgtatcatatgccaagtacgccccctattgacgtcaatgacggtaaatggcccgcctggcattatgcccagtacatgaccttatgggactttcctacttggcagtacatctacgtattagtcatcgctattaccatggtgatgcggttttggcagtacatcaatgggcgtggatagcggtttgactcacggggatttccaagtctccaccccattgacgtcaatgggagtttgttttggcaccaaaatcaacgggactttccaaaatgtcgtaacaactccgccccattgacgcaaatgggcggtaggcgtgtacggtgggaggtctatataagcagagctctctggctaactagagaacccactgcttactggcttatcgaaattaatacgactcactatagggagacccaagctggctagttaagcttggtaccgagctcggatccactagtccagtgtggtggaattgcccttggatcctcaatggcccagcgcaacggcatgtcgccgcgccccccgcccctcggtcgcggccgcggggccggagggccttcgggggttggttcctctcctccttcttcttgtgtgccgatgggagcgccgtccacagcgggcactggtgcgagtgctgcggctacgacgacgccgggccacggcgtccaccgggtagaaccccgcgggccgccgggcgcccctccgagtagcgacaacaatggcaacttttggcacggcccggagcgcctgttgctgtctcagattccggtggagcgccaggcgctgacggagctggaataccaggccatgggcgccgtgtggcgcgcggcgtttttggccaacagcacgggccgcgccatgcgcaagtggtcgcagcgcgacgcgggcacgctgctgccgctcggacggccgtacggattctacgcgcgggtgacgccgcgcagccagatgaacggcgtgggcgcgacggacctgcgtcaactgtcgccgcgggacgcgtggatcgtactggtggctaccgtggtgcacgaggtggaccccgcagccgacccgacgttgggcgacaaggccggccatcccgagggtctgtgcgcgcaggacggactgtacctggcgctgggcgccgggttccgcgtgttcgtgtacgacctggcaaacaacacgctgatcctagcggcgcgcgacgcggacgagtggtttcggcacggcgcgggcgaggtggtgcggctgtaccgctgcaaccggctgggcgtgggcaccccgcgcgcgacgctgctgcctcagccggcgctccgacagacgttgctgcgcgccgaggaggcgacggcgctcggacgggagctgcgccggcggtgggccggcacgacggtggcgctgcagacgccgggcaggcgactgcagccgatggtactgctgggcgcgtggcaggagctggcgcagtacgagccgttcgcgtcggcgccgcaccccgcgtcgctgctgacggccgtgcgtcggcacctgaaccagcgtctgtgctgcggctggctggcgctgggcgcggtgctgcccgcgcggtggctgggctgcgcggcggggccggcgacggggacggcggcggggacgacgtcgccgccagcggcgagcggcacggagacggaggccgccggcggggacgcgccgtgcgcgatagcgggagccgtggggtccgctgtacctgtgcctccgcagccgtacggcgccgccggcgggggcgcgatttgcgtgcctaacgcggacgcgcacgcggtggtcggggcggacgcggcagcagcagcggcgccgacggtgatggtgggttcgacagcgatggcgggtccggcggcgtcggggaccgtgccgcgcgccatgctggtggtgctgctggacgagctgggcgccgtgttcgggtactgcccgctggacgggcacgtgtacccgctggcggcggagctgtcgcactttctgcgcgcgggcgtgctgggcgcgctggcgctgggacgcgagtcggcgcccgccgccgaggccgcgcggcggctgctgcccgagctggaccgcgagcagtgggagcggccgcgctgggacgcgctgcacctgcacccgcgcgccgcgctgtgggcgcgcgagccgcacgggcagtgggagttcatgtttcgcgaacaacgcggtgaccccataaatgatcccctcgcatttcgtctttcggacgctcgaactctcggtctcgacctcaccaccgtcatgacagagcgtcaaagtcaattgcccgaaaagtatatcggtttctatcagattaggaaacctccttggctcatggaacaacctccacccccatctcgccaaaccaaaccggacgctgcaacgatgcccccaccgctcagtgctcaggcaagcgtcagctacgcgctccgatacgatgacgagtcctggcgcccgctcagcacagttgacgaccacaaagcctggttggatctcgacgaatcacattgggtcctcggggacagccgacccgacgatataaaacaacgcagactgctgaaggccactcaacgacgaggcgccgaaatcgacagacccatgcctgtcgtgcctgaagaatgttacgaccaacgcttcactaccgaaggccaccaggtcatcccgttgtgcgcgtccgaacccgaggatgacgacgaagatcctacctacgacgaattgccgtcgcgcccaccccagaaacataagccgccagacaaacctccgcgcttatgcaaaacgggccccggcccacctccgctgccgccaaagcaacggcacggttccaccgacggaaaagtttctgcgccccgacagtcggagcatcataaaagacagacccgaccgccaaggccgccaccgcccaaattcggggatagaaccgcggcccatctctcgcaaaatatgcgggacatgtacctcgatatgtgtacatcttcgggccacaggccacggccgccagcacctccgcggccgaaaaaatgtcaaacacacgcccctcaccacgttcatcataagcttaagggcaattctgcagatatccagcacagtggcggccgctcgagtctagagggcccgcggttcgaaggtaagcctatccctaaccctctcctcggtctcgattctacgcgtaccggtcatcatcaccatcaccattgagtttaaacccgctgatcagcctcgactgtgccttctagttgccagccatctgttgtttgcccctcccccgtgccttccttgaccctggaaggtgccactcccactgtcctttcctaataaaatgaggaaattgcatcgcattgtctgagtaggtgtcattctattctggggggtggggtggggcaggacagcaagggggaggattgggaagacaatagcaggcatgctggggatgcggtgggctctatggcttctgaggcggaaagaaccagctggggctctagggggtatccccacgcgccctgtagcggcgcattaagcgcggcgggtgtggtggttacgcgcagcgtgaccgctacacttgccagcgccctagcgcccgctcctttcgctttcttcccttcctttctcgccacgttcgccggctttccccgtcaagctctaaatcgggggctccctttagggttccgatttagtgctttacggcacctcgaccccaaaaaacttgattagggtgatggttcacgtagtgggccatcgccctgatagacggtttttcgccctttgacgttggagtccacgttctttaatagtggactcttgttccaaactggaacaacactcaaccctatctcggtctattcttttgatttataagggattttgccgatttcggcctattggttaaaaaatgagctgatttaacaaaaatttaacgcgaattaattctgtggaatgtgtgtcagttagggtgtggaaagtccccaggctccccagcaggcagaagtatgcaaagcatgcatctcaattagtcagcaaccaggtgtggaaagtccccaggctccccagcaggcagaagtatgcaaagcatgcatctcaattagtcagcaaccatagtcccgcccctaactccgcccatcccgcccctaactccgcccagttccgcccattctccgccccatggctgactaattttttttatttatgcagaggccgaggccgcctctgcctctgagctattccagaagtagtgaggaggcttttttggaggcctagtattaaggaatttggctggttgtttgttgtctttaatggaccgcccgcagggggggtggcatttcagtgtcgggtgacgagcgcgatccggccgggatcctaggaccccaaaagtttgtctgcgtattccagggcggggctcagttgaatctcccgcagcacctctaccagcaggtccgcggtgggctggagaaactcggccgtcccggggcaggcggtcgtcgggggtggaggcgcggcgcccaccccgtgtgccgcgcctggcgtctcctctgggggcgacccgtaaatggttgcagtgatgtaaatggtgtccgcggtccagaccacggtcaaaatgccggccgtggcgctccgggcgctttcgccgcgcgaggagctgacccaggagtcgaacggatacgcgtacatatgggcgtcccacccgcgttcgagcttctggttgctgtcccggcctataaagcggtaggcacaaaattcggcgcgacagtcgataatcaccaacagcccaatgggggtgtgttggataacaacgcctccgcgcggcaggcggtcctggcgctcccggccccgtaccatgatcgcgcgggtgccgtactcaaaaacatgcaccacctgcgcggcgtcgggcagtgcgctggtcagcgaggccctggcgtggcataggctatacgcgatggtcgtctgtggattggacatctcgcggtgggtagtgagtcccccgggccgggttcggtggaactgtaaggggacggcgggttaatatacaatgaccacgttcggatcgcgcagagccgatagtatgtgcttactaatgacgtcatcgcgctcgtggcgctcccggagcggatttaagttcatgcgaaggaattcggaggaggtggtgcgggacatggccacgtacgcgctgttgaggcgcaggttgccgggcgtaaagcagatggcgaccttgtccaggctaaggccctgggagcgcgtgatggtcatggcaagcttggagctgatgccgtagtcggcgtttatggccatggccagctccgtagagtcaatggactcgacaaactcgctgatgttggtgttgacgacggacatgaagccgtgttggtcccgcaagaccacgtaaggcaggggggcctcttccagtaactcggccacgttggccgtcgcgtgccgcctccgcagctcgtccgcaaaggcaaacacccgtgcgtacgtgtatcccatgagcgtataattgtccgtctgcagggcgacggacatcagccccccgcgcggcgagccggtcagcatctcgcagccccggaagataacgttgtccacgtacgtgctaaagggggcgccttcaaatgcctccccaaagagctcttggaggattcggaatctcccgaggaaggcccgcttcagcagcgcaaactgggtgtgaacggcggcggtggtctccggttccccgggggtgtagtggcagtaaaacacgtcgagctgttgttcgtccagccccgcgaaaataacgtcgaggtcgtcgtcgggaaaatcgtccgggcccccgtcccgcggccccagttgcttaaaatcaaacgcacgctcgccgggggcgcctgcgtcggccattaccgacgcctgcgtcggcacccccgaagatttggggcgcagagacagaatctccgccgttagttctcccatgcgggcgtaggcgagggtcctctgggtcgcatccaggcccgggcgctgcagaaagttgtaaaaggagataagcccgctaaatatgagccgcgacaggaacctgtaggcaaactccaccgaagtctccccctgagtctttacaaagctgtcgtcacgcaacactgcctcgaaggcccggaacgtcccactaaacccaaaaaccagttttcgcaggcgcgcggttaccgcgatctggctgttgaggacgtaagtgacgtcgttgcgggccacgaccagctgctgtttgctgtgcacctcgcagcgcatgtgccccgcgtcctggtcctggctctgcgagtagttggtgatgcggctggcgttggccgtgagccacttttcaatagtcaggccgggctggtgtgtcagccgtcggtattcgtcaaactccttgaccgacacgaacgtaagcacggggagggtgaacacgacaaactccccctcacgggtcaccttcaggtaggcgtggagcttggccatgtacgcgctcacctctttgtgggaggagaacaaccgcgtccagccggggaggttggcggggttggtgatgtagttttccgggacgacgaagcgatccacgaactgcatgtgctcctcggtgatgggtaggccgtactccagcaccttcatgaggttaccgaactcgtgctcgatgcaccgtttgttgttaataaaaatggcccagctatacgagaggcgggcgtactcccgcagcgtgcggttgcagatgaggtacgtgagcacgttctcgctctggcggacggaacaccgcagtttctggtgctcgaaggtcgactccagggacgccgtctgtgtcggcgagcccacacacaccaacacgggccgcaggcgggccgcgtactggggggtgtggtacagggcgttaatcatccaccagcaatacaccacggccgtgaggaggtgacgcccaaggagcccggcctcgtcgatgacgatcacgttgctgcgggtaaaggccggcagcgccccgtgggtggccggggccaaccgcgtcagggcgccctcggccaaccccagggtccgttccagggcggccagggcgcgaaactcgttccgcgactcctcgcccccggaggcggccagggtgcgcttcgtgaggtccaaaatcacctcccagtagtacgtcagatctcgtcgctgcaggtcctccagcgaggcggggttgctggtcagggtgtacgggtactgccccagttgggcctggacgtgattcccgcgaaacccaaattcatgaaagatggtgttgatgggtcggctgagaaaggcgcccgagagtttggcgtacatgttttgggccgcaatgcgcgtggcgcccgtcaccacacagtccaagacctcgttgattgtctgcacgcacgtgctctttccggagccagcgttgccggtgataagatacaccgcgaacggaaactccctgaggggcaggcctgcgggggactctaaggccgccacgtcccggaaccactgcagacggggcacttgcgctccgtcgagctgttgttgcgagagctctcggatgcgcttaaggattggctgcaccccgtgcatagacgtaaaatttaaaaaggcctcggccctccctggaacggctggtcggtccccgggttgctgaaggtgcggcgggccgggtctctgtccgtctagctggcgctccccgccggccgccgccatgaccgcaccacgctcgcgggcccccactacgcgtgcgcggggggacacggaagcgctgtgctcccccgaggacggctgggtaaaggttcaccccacccccggtacgatgctgttccgcgagattctccacgggcagctggggtataccgagggccagggggtgtacaacgtcgtccggtccagcgaggcgaccacccggcagctgcaggcggcgatctttcacgcgctcctcaacgccaccacttaccgggacctcgaggcggactggctcggccacgtggcggcccgcggtctgcagccccaacggctggttcgccggtacaggaacgcccgggaggcggatatcgccggggtggccgagcgggtgttcgacacgtggcggaacacgcttaggacgacgctgctggactttgcccacgggttggtcgcctgctttgcgccgggcggcccgagcggcccgtcaagcttccccaaatatatcgactggctgacgtgcctggggttggtccccatattacgcaagcgacaagaagggggtgtgacgcagggtctgagggcgtttctcaagcagcacccgctgacccgccagctggccacggtcgcggaggccgcggagcgcgccggccccgggttttttgagctggcgctggccttcgactccacgcgcgtggcggactacgaccgcgtgtatatttactacaaccaccgccggggcgactggctcgtgcgagaccccatcagcgggcagcgcggagaatgtctggtgctgtggcctcccttgtggaccggggaccgtctggtcttcgattcgcccgtacagcggctgtttcccgagatcgtcgcgtgtcactccctccgggaacacgcgcacgtctgccggctgcgcaataccgcgtccgtcaaggtgctgctggggcgcaagagcgacagcgagcgcggggtggccggcgccgcgcgggtcgttaacaaggtgttgggggaggacgacgagaccaaggccgggtcggccgcctcgcgcctcgtgcggcttatcatcaacatgaagggcatgcgccacgtaggcgacattaacgacactgtgcgtgcctacctcgacgaggccggggggcacctgatagacgccccggccgtcgacggtaccctcccgggattcggcaagggcggaaacagccgcgggtctgcgggccaggaccagggggggcgggcgccgcagcttcgccaggccttccgcacggccgtggttaacaacatcaacggcgtgttggagggctatataaataacctgtttggaaccatcgagcgcctgcgcgagaccaacgcgggcctggcgacccagttgcaggagcgcgaccgcgagctccggcgcgcaacatcgggggccctggagcgccagcagcgcgcggccgacctggcggccgagtccgtgaccgggggatgcggcagccgccctgcgggggcggacctgctccgggccgactatgacattatcgacgtcagcaagtccatggacgacgacacgtacgtcgccaacagttttcagcacccgtacatcccttcgtacgcccaggacctggagcgcctgtcgcgcctctgggagcacgagctggtgcgctgtttcaaaattctgtgtcaccgcaacaaccagggccaagagacgtcgatctcgtactccagcggggcgatcgccgcattcgtcgccccctactttgagtcagtgcttcgggccccccgggtaggcgcgcccatcacgggctccgatgtcatcctgggggaggaggagttatgggatgcggtgtttaagaaaacccgcctgcaaacgtacctgacagacatcgcggccctgttcgtcgcggacgtccagcacgcagcgctgcccccgcccccctccccggtcggcgccgatttccggcccggcgcgtccccgcggggccggtccagatcgcggtcgcccggaagaactgcgcgaggcgcgccggaccagggcgggggcatcgggcaccgggatggccgccgcgacggccgacgatgaggggtcggccgccaccatcctcaagcaggccatcgccggggaccgcagcctggtcgaggcggccgaggcgattagccagcagacgctgctccgcctggcctgcgaggtgcgccaggtcggcgaccgccagccgcggtttaccgccaccagcatcgcgcgcgtcgacgtcgcgcctgggtgccggttgcggttcgttctggacgggagtcccgaggacgcctatgtgacgtcggaggattactttaagcgctgctgcggccagtccagttatcgcggcttcgcggtggcggtcctgacggccaacgaggaccacgtgcacagcctggccgtgccccccctcgttctgctgcaccggttctccctgttcaaccccagggacctcctggactttgagcttgcctgtctgctgatgtacctggagaactgcccccgaagccacgccaccccgtcgacctttgccaaggttctggcgtggctcggggtcgcgggtcgccgcacgtccccattcgaacgcgttcgctgccttttcctccgcagttgccactgggtcctaaacacactcatgttcatggtgcacgtaaaaccgttcgacgacgagttcgtcctgccccactggtacatggcccggtacctgctggccaacaacccgccccccgttctctcggccctgttctgtgccaccccgacaagctcctcattccggctgccggggccgcccccccgctccgactgcgtggcctataaccccgccgggatcatggggagctgctgggcgtcggaggaggtgcgcgcgcctctggtctattggtggctttcggagaccccaaaacgacagacgtcgtcgctgttttatcagttttgttgaattttaggaaataaacccggttttgtttctgtggcctcccgacggatgcgcgtgtccttactccgtcttggtgggtgggtggctgtgtatggcgtcccatctgtgcggggaggggggcaagtcggcacgtattcggacagactcaagcacacacgggggagcgctcttgtctcagggcaatgtttttattggtcaaactcaggcaaacagaaacgacatcttgtcgtcaaagggatacacaaacttccccccctcgccccatactcccgccagcaccccggtaaacaccaactcaatctcgcgcaggatttcgcgcaggtgatgagcgcagtccacgggggggagcacaaggggccgcgggtatagatcgacggggacgccgaccgactccccgcctccgggacagacacgcacgacgcgccgccagtagtgctctgcgtccagcaaggcgccgccgcggaaggcagtggggggcaaggggtcgctggcctcaaagggggacacccgaacgctccagtactccgcgtccaaccgtttattaaacgcgtccaagataaggcggtcgcaggcgtcctccataaggccccgggccgtgagtgcgtcctcctccggcacgcctgccgttgtcaggcccaggacccgtcgcagcgtgtcgcgtacgaccccggccgccgtggtgtacgcgggcccgcggagaggaaatcccccaagatggtcagtgttgtcgcgggagttccagaaccacactcccgcctggctccaggcgactgcgtgggtgtagacgccctcgagggccaggcacagtgggtgccgcagccggaggccgttggccctaagcacggctcccacggccgtctcgatggcccgccgggcgtcctcgatcaccccggaagccgcatccgcgtcttgggggtccacgttaaagacaccccagaacgcacccccatcgcccccgcagaccgcgaacttcaccgagctggccgtctcctcgatctgcaggcagacggcggccattaccccacccaggagctgccgcagcgcagggcaggcgttgcacgtgtccgggaccaggcgctccaagacggccccggcccagggctctgagggagcggccaccaccagcgcgtccagtcttgctaggcccgtccggccgtgggggtccgccagcccgctccccccgaggtcggccagggccgccaggagctgggcgcgaagtccggggaagcaaaaccgcgccgtccagacgggcccgacggccgcgggcgggtctaacagttggatgattttagtggcgggatgccaccgcgccaccgcctcccgcactgcgggcaggaggcatccggctgccgccgaggccacgccgggccaggctcgcggggggaggacgaccctgacccccaccgcgggccaggcccccaggagcgcggcgtaagcggccgcggccccgcgcaccaggtcccgtgccgactcggccgtggccggcacggtgaacgtgggccaacccggaaaccccaggacggcaaagtacgggacgggtcccccccggacctcaaactcgggccccagaaaggcaaagacgggggccagggccccgggggcggcgtggaccgtggtatgccactgccggaaaagggcgacgagcgccggcgcggagaacttctcgccggcgcttacaaagtagtcgtaatcgcggggcagcagcacccgtgccgtgactcgttgcgggtgcccgcgtggccgcaggcccacctcgcacacctcgaccaggtccccgaacgcgccctccttcttgatcggcggaaacgcaagagtctggtattcgcgcgcaaatagcgcggttccggtggtgatgttaacggtcagcgaagcggtggacgcgcactggggggtgtcgcgaatggccgccaggcgcgcccacgccagccgcgcgtcgggatgctcggcaacgcgcgccgccagggccatagggtcgatgtcaatgttggcctccgcgaccaggagagcggcgcgaggggcggcgggcgggccccacgacgctctctcaactttcaccaccagtcccgtgcgtgggtccgagccgatacgcagcggggcgaacagggccaccggcccggtctggcgctccagggccgccaggacgcacgcgtacagcgcccgccacagagtcgggttctccaggggctccagcggggaggcggccggcgtcgtcgcggcgcgggcggccgccacgacggcctggacggagacgtccgcggagccgtagaaatcccgcagctccgtcgcggtgacggagacctccgcaaagcgcgcgcgaccctcccctgcggcgttgcgacatacaaaatacaccagggcgtggaagtactcgcgagcgcgggggggcagccataccgcgtaaagggtaatggcgctgacgctctcctccacccacacgatatctgcggtgtccatcgcacggcccctaaggatcacgggcggtctgtgggtcccatgctgccgtgcctggccgggcccggtgggttgcggaaaccggtgacgggggggggggcggtttttggggttggggtgggaaacggcccgggtccgggggccaacttggcccctcggtgcgttccggcaacagcgccgccggtccgcggacgaccacgtaccgaacgagtgcggtcccgagacttatagggtgctaaagttcaccgccccctgcatcatgggccaggcctcggtggggagctccgacagcgccgcctccaggatgatgtcagcgttggggttggcgctggatgagtgcgtgcgcaaacagcgcccccacgcgggcacgcgtagcttgaagcgcgcgcccgcaaactcccgcttgtgggccataagcagggcgtacagctgcctgtgggtccggcaggcgctgtggtcgatgtggtgggcgtccaacaaccccacgattgtctgtttggtgaggtttttaacgcgccccgccccgggaaacgtctgcgtgcttttggccatctgcacgccaaacagttcgccccagattatcttgaacagcgccaccgcgtggtccgtctcactaacggacccgcgcgggggacagccgcttagggcgtcggcgacgcgcttgacggcttcctccgagagcagaagtccgtcggttacgttacagtggcccagttcgaacaccagctgcatgtagcggtcgtagtggggggtcagcaggtccagcacgtcatcggggccgaaggtcctcccagatcccccggccgccgagtcccaatgcaggcgcgcggccatggtgctgcacaggcacaacagctcccagacaggggttacgttcagggtggggggcagggccacgagctccagctctccggtgacgttgatcgtggggatgacgcccgtggcgtagtggtcatagatccgccgaaatatggcgctgctgcgggtggccatgggaacgcggagacaggcctccagcaacgccaggtaaataaaccgcgtgcgtcccatcaggctgttgaggttgcgcatgagcgcgacaatttccgccggcgcgacatcggaccggaggtatttttcgacgaaaagacccacctcctccgtctcggcggcctgggccggcagcgacgcctcgggatcccggcaccgcagctcccgtagatcgcgctgggccctgagggcgtcgaaatgtacgccccgcaaaaacagacagaagtcctttggggtcagggtatcgtcgtgtccccagaagcgcacgcgtatgcagtttagggtcagcagcatgtgaaggatgttaaggctgtccgagagacacgccagcgtgcatctctcaaagtagtgtttgtaacggaatttgttgtagatgcgcgacccccgccccagcgacgtgtcgcatgccgacgcgtcacagcgccccttgaaccggcgacacagcaggtttgtgacctgggagaactgcgcgggccactggccgcaggaactgaccacgtggttcaggagcatgggcgtaaagacgggctccgagcgcgccccggagccgtccatgtaaatcagtagctcccccttgcggagggtgcgcacccgtcccagggactggtacacggacaccatgtccggtccgtagttcatgggtttcacgtaggcgaacatgccatcaaagtgcaggggatcgaagctgaggcccacggttacgaccgtcgtgtatataaccacgcggtattggccccacgtggtcacgtccccgaggggggtgagcgagtgaagcaacagcacgcggtccgtaaactgacggcagaaccgggccacgatctccgcgaaggagaccgtcgacgaaaaaatgcagatgttatcgcccccgccaaggcgcgcttccagctccccaaagaacgtggccccccgggcgtccggagaggcgtccggagacgggccgctcggcggcccgggcgggcgcagggcagcctgcaggagctcggtccccagacgcgggagaaacaggcaccggcgcgccgaaaacccgggcatggcgtactcgccgaccaccacatgcacgtttttttcgccccggagaccgcacaggaagtccaccaactgcgcgttggcggttgcgtccatggcgatgatccgaggacatgtgcgcagcaggcgtagcattaacgcatccacgcggcccagttgctgcatcgttggcgaatagagctggcccagcgtcgacataacctcgtccagaacgaggacgtcgtagttgttcagaaggttggggcccacgcgatgaaggctttccacctggacgataagtcggtggaaggggcggtcgttcataatgtaattggtggatgagaagtaggtgacaaagtcgaccaggcctgactcagcgaaccgcgtcgccagggtctgggtaaaactccgacgacaggagacgacgagcacactcgtgtccggagagtggatcgcttcccgcagccagcggatcagcgcggtagtttttcccgaccccattggcgcgcggaccacagtcacgcacctggccgtcggggcgctcgcgttggggaaggtgacgggtccgtgctgctgccgctcgatcgttgttttcgggtgaacccggggcacccattcggccaaatcccccccgtataacatccgcgctagcgatacgctcgacgtgtactgttcgcactcgtcgtccccaatgggacgcccggcccccagaggatcccccgactccgcgccccccacgaaaggcatgaccggggcgcggacggcgtggtgggtctggtgtgtgcaggtggcgacgtttgtggtctctgcggtctgcgtcacggggctcctcgtcctggcctctgtgttccgggcacggtttccctgcttttacgccacggcgagctcttatgccggggttaactccacggccgaggtgcgcgggggtgtagccgtgcccctcaggttggacacgcagagccttgtgggcacttatgtaatcacggccgtattgttgttggccgcggccgtgtatgccgtggtcggcgccgtgacctcccgctacgaccgcgccctggacgcgggccgccgtctggctgcggcccgcatggccatgccgcacgccacgctgatcgccggaaacgtctgctcttggttgctgcagatcaccgtcctgctgctggcccatcgcatcagccagctggcccacctggtttacgtcctgcactttgcgtgtctggtgtattttgcggcccatttttgcaccaggggggtcctgagcgggacgtatctgcgtcaggtgcacggcctgatggagctggccccgacccatcatcgcgtcgtcggcccggctcgcgccgtgctgacaaacgccttgctgttgggcgtcttcctgtgcacggccgacgccgcggtatccctgaataccatcgccgcgttcaactttaatttttcggccccgggcatgctcatctgcctgaccgtgctgttcgccattctcgtcgtatcgctgttgttggtggtcgagggggtgttgtgtcactacgtgcgcgtgttggtgggcccccacctgggggccgttgccgccacgggcatcgtcggcctggcctgcgagcactattacaccaacggctactacgtggtggagacgcagtggccgggggcacagacgggagtgcgcgtcgccctcgccctggtcgccgcctttgccctcggcatggccgtgctccgctgcacccgcgcctatctgtatcacaggcggcaccacaccaaattttttatgcgcatgcgcgacacgcgacaccgcgcacattccgccctcaagcgcgtacgcagttccatgcgcggatcgcgagacggccgccacaggcccgcgcccggcagcccgcccgggattcccgaatatgcggaagacccctacgcgatctcatacggcggccagctcgaccggtacggagattccgacggggagccgatttacgacgaggtggcggacgaccaaaccgacgtattgtacgccaagatacaacacccgcggcacctgcccgacgacgagcccatctatgacaccgttggggggtacgaccccgagcccgccgaggaccccgtgtacagcaccgtccgccgttggtagctgtttggttccgttttaataaaccgtttgtgtttaacccgaccgtggtgtatgtctggtgtgtggcgtccgatcccgttactatcaccgtccccccccctcaaccccggcgattgtgggttttttaaaaacgacacgcgtgcgaccgtatacagaacattattttggtttttattcgctatcggacatggggggtggaaactgggtggcggggcaggcgcctccgggggtccgccggtgagtgtggcgcgagggggggtccgacgaacgcaggcgcggtctccccggggcccgcgtaaccacgcgcatatccgggggcacgtagaaattaccttcctcttcggactcgatatccacgacgtcaaagtcgtgggcggtcagcgagacgacctccccgtcgtcggtgatgaggacgttgtttcggcagcagcagggccgggccccggagaacgagaggcccatagctcggcgagcgtgtcgtcgaacgccaggcggctgcttcgctggatggccttatagatctccggatcgatgcggacgggggtaatgatcagggcgatcggaacggcctggttcgggagaatggacgccttgctgggtcctgcggccccgagagccccggcgccgtcctccaggcggaacgttacgccctcctccgcgctggtgcggtgcctgccgataaacgtcaccagatgcgggtggggggggcagtcggggaagtggctgtcgagcacgtagccctgcaccaagatctgcttaaagttcgggtggcgggggttcgcgaagacgggctcgcggcggaccagatccccggagctccaggacacgggggagatggtgtggcgtccgaggtcgggggcgccaaacagaagcacctccgagacaacgccgctatttaactccaccaaggcccgatccgcggcggagcaccgccttttttcgcccgaggcgtgggcctctgaccaggcctggtcttgcgtgacgagagcctcctccgggccggggacgcgcccgggcgcgaagtatcgcacgctgggcttcgggatcgaccggataaatgcccggaacgcctccggggaccggtgtgccatcaagtcctcgtacgcggaggccgtggggtcgctggggtccatggggtcgaaagcgtacttggcccggcatttgacctcgtaaaaggccaggggggtcttggggactggggccaggtagccgtgaatgtcccgaggacagacgagaatatccagggacgccccgaccatccccgtgtgaccgtccatgaggaccccacacgtatgcacgttctcttcggcgaggtcgctgggttcgtggaagataaagcgccgcgtgtcggcgccggcctcgccgccgtcgtccgcgcggcccacgcagtagcgaaacagcaggcttcgggccgtcggctcgttcacccgcccgaacatcaccgccgaagactgtacatccggtcgcaggctggcgttgtgcttcagccactggggcgagaaacacggaccctgggggccccagcggagggtggatgcggtcgtgaggccccgccggagcagggcccatagctggcagtcggcctggttttgcgtggccgcctcgtaaaaccccatgaggggccggggcgccacggcgtccgcggcggccgggggggcgcggcgcgtcaggcgccataggtgccggccgagtccgcggtccaccatacccgcctcctcgaggaccacggccagggaacacagataatccaggcgggcccagaggggaccgatggccagaggggcgcggacgccgcgcagcaacccgcgcaggtggcgctcgaacgtctcggctagtatatgggagggcagcgcgttggggatcaccgacgccgaccacatagagtcaaggtccggggagtcgggatcggcgtccgggtcgcgggcgtgggtgcccccaggagatagcggaatgtccggggtcggaggcccggaggcgtcagaaagtgccggcgacgcggcccggggcttttcgtctgcggtgtcggtggcgtgctgatcacgtggggggttatcgggcgaatgggagctcgggtccacagctgacgtcgtctggggtggggggggcaggggacggaaggtggttgtcagcggaagactgttagggcgggggcgcttgggggggctgtcggggccacgaggggtgtcctcggccagggcccagggacgcttagtcacggtgcgtcccggcggacatgctgggcctaccgtggactccatttccgagacgacgtggggggagcggtggttgagcgcgccgccgggtgaacgctgattctcacgacagcgcgtgccgcgcgcacgggttggtgtgacacaggcgggacaccagcaccaggagaggcttaagctcgggaggcagcgccaccgacgacagtatcgccttgtgtgtgtgctggtaatttatacaccgatccgtaaacgcgcgccgaatcttgggattgcggaggtggcgccggatgccctctgggacgtcatacgccaggccgtgggtgttggtctcggccgagttgacaaacagggctgggtgcagcacgcagcgataggcgagcagggccagggcgaagtccggcgacagctggttgttgaaatactggtaaccgggaaaccgggtcacgggtacgcccaggctcggggcgacgtacacgctaaccaccaactccagcagcgtctggcccagggcgtacaggtcaaccgctagcccgacgtcgtgcttcaggcggtggttggtaaattcggcccgttcgttgttaaggtatttcaccaacagctccgggggctggttatacccgtgacccaccagggtgtgaaagttggctgtggttagggcggtgggcatgccaaacatccggggggacttgaggtccggctcctggaggcaaaactgcccccgggcgatcgtggagttggagttgagggtgacgaggctaaagtcggcgaggacggcccgccggagcgagacggcgtccgaccgcagcatgacgaggatgttggcgcacttgatatccaggtggctgatcccgcaggtggtgtttaaaaacacaacggcacgggccagctccgtgaagcactggtggagggccgtcgagaccgaggggtttgttgtgcgcagggacgccagttggccgatatacttaccgaggtccatgtcgtacgcggggaacactatctgtcgttgttgcagcgagaacccgaggggcgcgatgaagccgcggatgttgtgggtgcggccggcgcgtagagcgcactccccgaccaacagggtcgcgatgagctcaacggcaaaccactccttttcctttatggtcttaacggcaagcttatgttcgcgaatcagttggacttcgccgtatcccccagaccccccgaagcttcgggccccggggatctcgagggtcgtgtagtgtagggcggggttgatggcgaacacggggctgcatagcttgcggatgcgcgtgagggtgaggatgtgcgagggggacgaggggggtgcggttaacgccgcctgggatctgcgcaggggcgggcggttcagtttggccgccgtaccgggcgcctcgggggacgcgcggcgatgagacgagcggctcattcgccatcgggatagtcccgcgcgaagccgctcgcggaggccggatcggtggcggcacccgtgggaggagcgggagacggcggcgttctggagagaggggccgctggggcgcccggaggccccatgggggttggagtgtatgtaggatgcgagccaatccttgaaggaccgttggcgtgcaccttgggggctgaggttagctgccacatgaccagcaggtcgctgtctgcgggactcatccatccttcggccaggtcgccgtctccccacagagaagcgttggtcgctgcctcctcgagttgctcctcctggtccgcaagacgatcgtccacggcgtccaggcgctcaccaagcgccggatcgaggtaccgtcggtgtgcggttagaaagtcacgacgcgccgcttgctcctccacgcgaattttaacacaggtcgcgcgctgtcgcatcatctctaagcgcgcgcgggactttagccgcgcctccaattccaagtgggccgcctttgcagccataaaggcgccaacaaaccgaggatcttgggtgctgacgccctcccggtgcagctgcagggtctggtccttgtaaatctcggctcggaggtgcgtctcggccaggcgtcggcgcagggccgcgtgggcggcatctcggtccattccgccaccctgcgggcgacccgggggtgctctgatagtctcgcgtgcccaaggcccgtgatcggggtacttcgccgccgcgacccgccacccggtgtgcgcgatgtttggtcagcagctggcgtccgacgtccagcagtacctggagcgcctcgagaaacagaggcaacttaaggtgggcgcggacgaggcgtcggcgggcctcacaatgggcggcgatgccctacgagtgccctttttagatttcgcgaccgcgacccccaagcgccaccagaccgtggtcccgggcgtcgggacgctccacgactgctgcgagcactcgccgctcttctcggccgtggcgcggcggctgctgtttaatagcctggtgccggcgcaactaaaggggcgtgatttcgggggcgaccacacggccaagctggaattcctggcccccgagttggtacgggcggtggcgcgactgcggtttaaggagtgcgcgccggcggacgtggtgcctcagcgtaacgcctactatagcgttctgaacacgtttcaggccctccaccgctccgaagcctttcgccagctggtgcactttgtgcgggactttgcccagctgcttaaaacctccttccgggcctccagcctcacggagaccacgggcccccccaaaaaacgggccaaggtggacgtggccacccacggccggacgtacggcacgctggagctgttccaaaaaatgatccttatgcacgccacctactttctggccgccgtgctcctcggggaccacgcggagcaggtcaacacgttcctgcgtctcgtgtttgagatccccctgtttagcgacgcggccgtgcgccacttccgccagcgcgccaccgtgtttctcgtcccccggcgccacggcaagacctggtttctggtgcccctcatcgcgctgtcgctggcctcctttcgggggatcaagatcggctacacggcgcacatccgcaaggcgaccgagccggtgtttgaggagatcgacgcctgcctgcggggctggttcggttcggcccgagtggaccacgttaaaggggaaaccatctccttctcgtttccggacgggtcgcgcagtaccatcgtgtttgcctccagccacaacacaaacgtaagtcctcttttctttcgcatggctctcccaaggggccccgggtcgacccgacccacacccacccacccacatacacacacaaccagacgcgggaggaaagtctgccccgtgggcactgatttttattcgggatcgcttgaggaggcccgggcaacggcccgggcaacggtggggcaactcgtagcaaataggcgactgatgtacgaagagaagacacacaggcgccacccggcgctggtcggggggatgttgtccgcgccgcaccgtcccccgacgacctcttgcagacggtccgtgatgcaaggacggcggggggcctgcagcagggtgaccgtatccacgggatggccaaagagaagcggacacaggctagcatccccctggaccgccagggtacactgggccatcttggcccacagacacggggcgacgcagggacaggactccgttacgacggaggagagccacagtgcgttggcggaatcgatgtggggcggcggggcgcaggactcgcagccccccgggtggttagtgatcctggccaggagccatcccagatggcgggccctgcttcccggtggacagagcgaccccaggtcgctgtccatggcccagcagtagatctggccgctggggaggtgccaccaggcccccgggcccaaggcgcagcacgcgcccggctccgggggggtcttcgcggggaccagatacgcgccatccagctcgccgaccactggctcctccgcgagctgttcggtggttgggtcgggggtttcctccgggggggtggccgcccgtatgcgggcgaacgtgagggtgcacaggagcggggtcagggggtgcgtcacgctccggaggtggacgatcgcgcagtagcggcgctcgcggttaaagaaaaagagggcaaagaaggtgttcgggggcaaccgcagcgccttggggcgcgtcagatacagaaaaatctcgcagaagagggcgcgcccggggtctgggttaggaagggccacctgacacagaggctcggtgaggaccgttagacaccgaaagatcttgagccgctcgtccgcccgaacgacgcgccacacaaagacggagttgacaatgcgcgcgatagagtcgacgtccgtccccaggtcgtcgactctgtcgcgcgtgccgcgagctccggcccgggaatccggccggggcaaggtccccgggggaccaggcggcgccaggggccgccggggtcccagctgcgccatgccgggggcggggggagggcaaaccccagaggcgggggccaacggcgcggggaggagtggatgggcgaggtggccgggggaaggcgcccgctagcgagaacggccgttcccggacgacaccttgcgacaaaacctaaggacagcggcccgcgcgacggggtccgagaggctaaggtaggccgcgatgttaatggtgaacgcaaagccgccgggaaagacaactatgccacagaggcggcgattaaaccccaggcagaggtaggcgtagctttccccgggcaggtattgctcgcagaccctgcgtggggctgtggaggggacggcctccatgaagcgacatttactctgctcgcgtttactgacgtcaccatccatcgccacggcgattggacgattgttaagccgcagcgtgtctccgcttgtgctgtagtagtcaaaaacgtaatggccgtcggagtcggcaaagcgggccgggaggtcgtcgccgagcgggacgacccgccgcccccgaccgccccgtccccccaggtgtgccaggacggccagggcatacgcggtgtgaaaaaaggcgtcgggggcggtcccctcgacggcgcgcatcaggttctcgaggagaatggggaagcgcctggtcacctcccccagccacgcgcgttggtcggggccaaagtcatagcgcaggcgctgtgagattcgcgggccgccctgaagcgcggcccggatggcctggcccagggcccggaggcacgccagatgtatgcgcgcggtaaaggcgacctcggcggcgatgtcaaagggcggcaggacggggcgcgggtggcgcaggggcacctcgagcgcgggaaagcggagcagcagctccgcctgcccagcgggagacagctggtgggggcgcacgacgcgttctgcggcgcaggcctcggtcagggccgtggccagcgccgaggacagcagcggagggcgggcgcgtcgcccgccccacgccactgagttctcgtaggagacgacgacgaagcgctgcttggttccgtagtggtggcgcaggaccacggagatagaacgacggctccacagccagtccggccggtcgccgccggccagggcttcccatccgcgatccaaccactcgaccagcgaccgcggctttgtggtaccaggggtaagggttagaacgtcgttcaggatgtcctcgcccccgggcccgtggggcgctggggccacaaagcggcccccgccggggggctccagacccgccagcaccgcatctgcgtcagccgcccccatggcgcccccgctgacggcctggtgaaccagggcgccctggcggagccccgatgcaacgccacaggccgcacgcccggtccgagcgcggaccgggtggcggcgggtgacgtcctgcactgcccgctgaaccaacgcgaggatctcctcgttctcctgtgcgatggacacgtcctgggccgcggtcgtgtcgccgccgggggccgtcagctgctcctccggggagatgggggggtcggacgccccgacgatgggcgggtctgcgggcgcccccgcgtggggccgggccaagggctgcggacgcggggacgcgctttcccccagacccatggacaggtgggccgcggcctccttcgcggccggcggggcggcggcgccaagcagagcgacgtagcggcacaaatgccgacagacgcgcatgatgcgcgtgctgtcggccgcgtagcgcgtgttgggggggacgagctcgtcgtaactaaacagaatcacgcgggcacagctcgcccccgagccccacgcgaggcgcagcgccgccacggcgtacgggtcatagacgccctgcgcgtcacacaccacgggcagggagacgaacaaccccccggcgctggacgcacgcggaaggaggccagggtgtgccggcacgacgggggccagaagctcccccaccgcatccgcgggcacgtaggcggcaaacgccgtgcaccacggggtacagtcgccggtggcatgagcccgagtctggatttcgacctggaagtttgcggccgtcccgagtccggggcggccgcgcatcagggcggccagagggattcccgcggccgccaggcactcgctggatatgatgacgtgaaccaaagacgagggccgacccgggccgtggccgagatcgtactggacctcgttggccaagtgcgcgttcatggttcggggtgggtgtgggtgtgtaggcgatgcgggtcccccgagtccgcgggaagggcgtgggtttggcgcgcgtatgcgtattcgccaacggaggcgtgcgtgcttatgcgcggcgcgtttcttctgtctccagggaatccgaggccaggactttaacctgctctttgtcgacgaggccaactttattcgcccggatgcggtccagacgattatgggctttctcaaccaggccaactgcaagattatcttcgtgtcgtccaccaacaccgggaaggccagtacgagctttttgtacaacctccgcggggccgccgacgagcttctcaacgtggtgacctatatatgcgatgatcacatgccgagggtggtgacgcacacaaacgccacggcctgttcttgttatatcctcaacaagcccgttttcatcacgatggacggggcggttcgccggaccgccgatttgtttctggccgattccttcatgcaggagatcatcgggggccaggccagggagaccggcgacgaccggcccgttctgaccaagtctgcgggggagcggtttctgttgtaccgcccctcgaccaccaccaacagcggcctcatggcccccgatttgtacgtgtacgtggatcccgcgttcacggccaacacccgagcctccgggaccggcgtcgctgtcgtcgggcggtaccgcgacgattatatcatctttgccctggagcacttttttctccgcgcgctcacgggctcggcccccgccgacatcgcccgctgcgtcgtccacagtctgacgcaggtcctggccttgcatcccggggcgtttcgcggcgtccgggtggcggtcgagggaaatagcagccaggactcggccgtcgccatcgccacgcacgtgcacacagagatgcaccgcctactggcctcggagggggccgacgcgggctcgggccccgagcttctcttctaccactgcgagcctcccgggagcgcggtgctgtacccctttttcctgctcaacaaacagaagacgcccgcctttgaacactttattaaaaagtttaactccgggggcgtcatggcctcccaggagatcgtttccgcgacggtgcgcctgcagaccgacccggtcgagtatctgctcgagcagctgaataacctcaccgaaaccgtctcccccaacactgacgtccgtacgtattccggaaaacggaacggcgcctcggatgaccttatggtcgccgtcattatggccatctaccttgcggcccaggccggacctccgcacacattcgctcccatcacacgcgtttcgtgagcgcccaataaacacacccaggtatgctacgcacgaccacggtgtcgcctgttaaggggggggaagggggtgttggcgggaagcgtgggaacacgggggattctctcacgaccggcaccagtaccacccccctgtgaacacagaaacccaacccaaatcccataaacatacgacacacaggcatattttggaatttcttgggtttttatttatttaggtatgctggggtttctccctggatgcccaccccccacccccccccgtgggtctagccgggccttagggatagcgtataacgggggccatgtctccggaccgcacaacggccgcgccgtcaaaggtgcacacccgaaccacgggagccagggccaaggtgtctcctagttggcccgcgtgggtcagccaggcgacgagcgcctcgtaaagcggcagccttcgctctccatcctgcaccagggccggggcttcggggtgaatgagctgggcggcctcccgcgtgacactctgcatctgcaggagagcgttcacgtacccgtcctgggcacttagcgcaaagagccgggggattagcgtaaggatgatggtggttccctccgtgatcgagtaaaccatgttaaggaccagcgatcgcagctcggcgtttacgggaccgagttgttggacgtccgccagcagcgagaggcgactcccgttgtagtacagcacgttgaggtctggcagccctccggggtttctggggctggggttcaggtcccggatgcccctggccacgagccgcgccacgatttcgcgcgccaggggcgatggaagcggaacgggaaaccgcaacgtgaggtccagcgaatccaggcgcacgtccgtcgcttggccctcgaacacgggcgggacgaggctgatggggtccccgttacagagatctacgggggaggtgttgcgaaggttaacggtgccggcgtgggtgaggcccacgtccaggggacaggcgacgattcgcgtgggaagcacccgggtgatgaccgcggggaagcgccttcggtacgccagcaacaaccccaacgtgtcgggactgacgcctccggagacgaaggattcgtgcgccacgtcggccagcgtcagttgccggcggatggtcggcaggaataccacccgcccttcgcagcgctgcagcgccgccgcatcggggcgcgagatgcccgagggtatcgcgatgtcagtttcaaagccgtccgccagcatggcgccgatccacgcggcagggagtgcagtggtggttcgggtggcgggaggagcgcggtgggggtcagcggcgtagcagagacgggcgaccaacctcgcataggacggggggtgggtcttagggggttgggaggcgacagggaccccagagcatgcgcggggaggtctgtcgggcccagacgcaccgagagcgaatccgtccacggagtcccggtctgggttttatggggcccggccctcggaatcgcggcttgtcggcggggacaaagggggcggggctagggggcttgcggaaacagaagacgcgtgggataaaagaatcgcactaccccaaggaagggcggggcggtttattacagagccagtcccttgagcggggatgcgtcatagacgagatactgcgcgaagtgggtctcccgcgcgtgggcttccccgttgcgggcgctgcggaggagggcggggtcgctggcgcaggtgagcgggtaggcctcctgaaacaggccacacgggtcctccacgagttcgcggcaccccggggggcgcttaaactgtacgtcgctggcggcggtggccgtggacaccgccgaacccgtctccacgatcaggcgctccaggcagcgatgtttggcggcgatgtcggccgacgtaaagaacttaaagcaggggctgagcaccggcgaggccccgttgaggtggtaggccccgttatagagcaggtccccgtacgaaaatcgctgcgacgcccacgggttggccgtggccgcaaaggcccgggacgggtcgctctggccgtggtcgtacatgagggcggtgacatccccctccttgtcccccgcgtaaacgcccccggcggcgcgtccccgggggttgcagggccggcggaagtagttgacgtcggtcgacacgggggtggcgataaactcacacacggcgtcctggccgtggtccatccctgcgcgccgcggcacctgggcgcacccgaacacggggacgggctgggccggccccaggcggtttcccgccacgaccgcgttccgcaggtacacggctgccgcgttgtccaggagagggggagccccgcggcccaggtaaaagttttggggaaggttgcccatgtcggtgacggggttgcggacggttgccgtggccacgacggcggtgtagcccacgcccaggtccacgttcccgcgcggctgggtgagcgtgaagtttacccccccgccagtttcgtgccgggccacctggagctggcccaggaagtacgcctccgacgcgcgctccgagaacagcatgttctcagtcacaaagcggtcctgtcggacgacggtgaacccaaacccgggatggaggcccgtcttgagctgatgatgcaaggccacgggactgatcttgaagtaccccgccatgagcgcgtaggtcagcgcgttctccccggccgcgctctcgcggacgtgctgcacgacgggctgtcggatcgacgaaaagtagttggcccccagagccggggggaccagggggacctgccgcgacaggtcgcgcagggccggggggaaattgggcgcgttcgccacgtggtcggccccggcgaacagcgcgttgacgggaagggggtaaaaatagtcgccattttggatggtatggtccagatgctggggggccatcagcaggattccggcgtgcaacgccccgtcgaatatgcgcatgttggtggtggacgcggtgttggcgcccgcgtcgggcgccgccgagcagagcagcgccgttgtgcgttcggccatgttgtgggccagcacctgcagcgtgagcatggcgggcccgtccactaccacgcgcccgttgtgaaacatggcgttgaccgtgttggccaccagattggccgggtgcagggggtgcgcggggtccgtcacggggtcgctggggcactcctcgccgggggcgatctccgggaccaccatgttctgcagggtggcgtatacgcggtcgaagcgaacccccgcggtgcagcagcggccccgcgagaaggcgggcaccatcacgtagtagtaaatcttgtggtgcacggtccagtccgccccccggtgcggccggtcatccgcggcgtccgcggctcgggcctgggtgttgtgcagcagctggccgtcgttgcggttgaagtccgcggtcgccacgttacatgccgccgcgtacacggggtcgtggccccccgcgctaacccggcagtcgcgatggcggtccagggccgcgcgccgcatcagggcgtcacagtcccacacgaggggtggcagcagcgccgggtctcgcattaggtgattcagctcggcttgcgcctgcccgcccagctccgggccggtcagggtaaagtcatcaaccagctgggccagggcctcgacgtgcgccaccaggtcccggtacacggccatgcactcctcgggaaggtctcccccgaggtaggtcacgacgtacgagaccagcgagtagtcgttcacgaacgccgcgcaccgcgtgttgttccagtagctggtgatgcactggacaacgagccgggccagggcgcagaagacgtgctcgctgccgtgtatggcggcctgcagcaggtaaaacaccgccgggtagttgcggtcgtcgaacgccccgcgaacggcggcgatggtggcgggggccatggcgtggcgtcccacccccagctccaggccccgggcgtcccggaacgccgccggacatagcgccaggggcaagttgccgttcaccacgcgccaggtggcctggatctcccccgggccggccgggggaacgtccccccccggcagctccacgtcggccacccccacgaagaagtcgaacgcggggtgcagctcaagagccaggttggcgttgtcgggctgcataaactgctccggggtcatctggccttccgcgacccatcggacccgcccgtgggccaggcgctgcccccaggcgttcaaaaacagctgctgcatgtctgcggcggggccggccggggccgccacgtacgccccgtacggattggcggcttcgacggggtcgcggttaaggcccccgaccgccgcgtcaacgttcatcagcgaagggtggcacacggtcccgatcgcgtgttccagagacaggcgcagcacctggcggtccttcccccaaaaaaacagctggcggggcgggaaggcgcggggatccgggtggccgggggcggggactaggtccccggcgtgcgcggcaaaccgttccatgaccggattgaacaggcccaggggcaggacgaacgtcaggtccatggcgcccaccagggggtagggaacgttggtggcggcgtagatgcgcttctccagggcctccagaaagaccagcttctcgccgatggacaccagatccgcgcgcacgcgcgtcgtctggggggcgctctcgagctcgtccagcgtctgccggttcaggtcgagctgctcctcctgcatctccagcaggtggcggcccacgtcgtccagacttcgcacggccttgcccatcacgagcgccgtgaccaggttggccccgttcaggaccatctcgccgtacgtcaccggcacgtcggcttcggtgtcctccactttcaggaaggactgcaggaggcgctgtttgatcggggctgtggtgactagcaccccgtcgaccggccgcccgcgcgtgtcggcatgcgtcagacggggcacggccacggagggctgcgtggccgtggtgaggtccacgagccaggcctcgacggcctcccggcggtggcccgccttgcccaggaaaaagctcgtctcgcagaagcttcgctttagctcggcgaccagggtcgcccgggccaccctggtggccaggcggccgttgtccaggtatcgttgcatcggcaacaacaaagccaggggcggcgccttttccagcagcacgtgcagcatctggtcggccgtgccgcgctcaaacgccccgaggacggcctggacgttgcgagcgagctgttggatggcgcgcaactggcgatgcgcgctgatacccgtcccgtccagggcctcccccgtgagcagggcgatggcctcggtggccaggctgaaggcggcgttcagggcccggcggtcgataatcttggtcatgtaattgtgtgtgggttgctcgatggggtgcgggccgtcgcgggcaatcagcggctggtggacctcgaactgtacgcgcccctcgttcatgtaggccagctccggaaacttggtacacacgcacgccaccgacaacccgagctccagaaagcgcacgagcgacagggtgttgcaatacgaccccagcagggcgtcgaactcgacgtcgtacaggctgtttgcatcggagcgcacgcgggaaaaaaaatcgaacaggcgtcgatgcgacgccacctcgatcgtgctaaggagggacccggtcggcaccatggccgcggcataccggtatcccggagggtcgcggttgggagcggccatggggtcgcgtggagatcggctgtctctagcgatattggcccggggaggctaagatccaccccaacgcccggccacccgtgtacgtgcccgacggcccaaggtccaccgaaagacacgacggacccggacccaaagaggcgggggatgctgtgtgagaggccgggtgtcggtcgggggggaaaggcaccgggagaaggctgcggcctcgttccaggagaacccagtgtccccaacagacccggggacgtgggatccccggccttatatacccccccccgccccacccccgttagaacgcgacgggtgcattcaagatggccctggtccaaaagcgtgccaggaagaaattggcagaggcggcaaagctgtccgccgccgccacccacatcgaggccccggccgcacaggctatccccagggcccgtgtgcgcaggggatcggtgggtggcagcatttggttggtggcgataaagtggaaaagcccgtccggactgaaggtctcgtgggcggcggcgaacaaggcacacagggccgtgcctcccaaaaacacggacatcccccaaaacacgggcgccgacaacggcagacgatccctcttgatgttaacgtacaggaggagcgcccgcaccgcccacgtaacgtagtagccgacgatggcggccaggatacaggccggcgccaccacccttccggtcagcccgtaatacatgcccgctgccaccatctccaacggcttcaggaccaaaaacgaccaaaggaacagaatcacgcgctttgaaaagaccggctgggtatggggcggaagacgcgagtatgccgaactgacaaaaaaatcagaggtgccgtacgaggacaatgaaaactgttcctccagcggcagttctccctcctcccccccgaaggcggcctcgtcgaccagatctcgatccaccagaggaaggtcatcccgcatggtcatggggtgtgcggtggaggtggggagaccgaaaccgcaaagggtcgcttacgtcagcaggatcccgagatcaaagacacccgggttcttgcacaaacaccacccgggttgcatccgcggaggcgagtgttttgataaggccgttccgcgccttgatataacctttgatgttgaccacaaaacccggaatttacgcctacgccccaatgcccacgcaagatgaggtaggtaacccccccgtgggtgtgacgttgcgtttagttcattggaggccaaggggaaaaatggggtggggaggaaacggaaaacccagtaggccgtgtcgggaacacgcccggggttgtcctcaaaaggcagggtccatactacggaagccgtcgttgtattcgagacctgcctgtgcgacgcacgtcggggttgcctgtgtccggttcggcccccaccgcgtgcggcacgcacgaggacgagtccgcgtgctttattggcgttccaagcgttgccctccagtttctgttgtcggtgttcccccatacccacgcccacatccaccgtagggggcctctgggccgtgttacgtcgccgcccgcgatggagcttagctacgccaccaccatgcactaccgggacgttgtgttttacgtcacaacggaccgaaaccgggcctactttgtgtgcggggggtgtgtttattccgtggggcggccgtgtgcctcgcagcccggggagattgccaagtttggtctggtcgttcgagggacaggcccagacgaccgcgtggtcgccaactatgtacgaagcgaactccgacaacgcggcctgcaggacgtgcgtcccattggggaggacgaggtgtttctggacagcgtgtgtcttctaaacccgaacgtgagctccgagctggatgtgattaacacgaacgacgtggaagtgctggacgaatgtctggccgagtactgcacctcgctgcgaaccagcccgggtgtgctaatatccgggctgcgcgtgcgggcgcaagacagaatcatcgagttgtttgaacacccaacgatagtcaacgtttcctcgcactttgtgtataccccgtccccatacgtgttcgccctggcccaggcgcacctcccccggctcccgagctcgctggaggccctggtgagcggcctgtttgacggcatccccgccccacgccagccacttgacgcccacaacccgcgcacggatgtggttatcacgggccgccgcgccccacgacccatcgccgggtcgggggcggggtcggggggcgcgggcgccaagcgggccaccgtcagcgagttcgtgcaagtcaaacacattgaccgcgtgggccccgctggcgtttcgccggcgcctccgccaaacaacaccgactcgagttccctggtgcccggggcccaggattccgccccgcccggccccacgctaagggagctgtggtgggtgttttatgccgcagaccgggcgctggaggagccccgcgccgactctggcctcacccgcgaggaggtacgtgccgtacgtgggttccgggagcaggcgtggaaactgtttggctccgcgggggccccgcgggcgtttatcggggccgcgttgggcctgagccccctccaaaagctggccgtttactactatatcatccaccgagagaggcgcctgtcccccttccccgcgctagtccggctcgtaggccggtacacacagcgccacggcctgtacgtccctcggcccgacgacccagtcttggccgatgccatcaacgggctggttcgcgacgcgctggcggccggaaccacagccgagcagctcctcatgttcgaccttctccccccaaaggacgtgccggtgggaagcgacgtgcaggccgacagcaccgctctgctgcgctttatagaatcgcaacgtctcgccgtccccgggggggtgatctcccccgagcacgtcgcgtaccttggtgcgttcctgagcgtgctgtacgctggccgcgggcgcatgtccgcagcaacgcacaccgcgcggctgacaggggtgacctccctggtgctagcggtgggtgacgtggaccgtctttccgcgtttgaccgcggagcggcgggcgcggccagccgcacgcgggccgccgggtacctggatgtgcttcttaccgttcgtctcgctcgctccaaacacggacagtctgtgtaacagaccccaataaacgtatgtcgctaccacacccttgtgtgtcaatggacgcctctccgggggggaagggaaaacaaagaggggctgggggagcggcaccactggggcctgaacaaacaaacaaaccacagacacggttacagtttattcggtcgggcggataaacggccgaagccacgccccctttattcgcgtctccaaaaaaacgggacacttgtccggagaacctttaggatgccagccagggcggcggtaatcataaccacgcccagcgcagaggcggccagaaacccgggcgcaattgcggccacgggctgcgtgtcaaaggctagcaaatgaatgacggttccgtttggaaatagcaacaaggccgtggacggcacgtcgctcgaaaacacgctcggggcgccctccgtcggcccggcggcgatttgctgctgtgtgttgtccgtatccaccagcaacacagacatgacctccccggctggggtgtagcgcataaacacggcccccacgagccccaggtcgcgctggttttgggtgcgcaccagccgcttggactcgatatcccgggtggagccttcgcatgtcgcggtgaggtaggttaggaacagtgggcgtcggacgtcgacgccggtgagcttgtagccgatcccccggggcagaggggagtgggtgacgacgtagctggcgttgtgggtgatgggtaccaggatccgtggctcgacgttggcagactgccccccgcaccgatgtgaggcctcagggacgaaggcgcggatcagggcgttgtagtgtgcccagcgcgtcagggtcgaggcgaggccgtgggtctgctgggccaggacttcgaccggggtctcggatcgggtggcttgagccagcgcgtccaggataaacacgctctcgtctagatcaaagcgcagggaggccgcgcatggcgaaaagtggtccggaagccaaaagagggttttctggtggtcggcccgggccagcgcggtccggaggtcggcgttggtcgctgcggcgacgtcggacgtacacagggccgatgctatcagaaggctccggcgggcgcgttcccgctgcaccgccgaggggacgcccgccaagaacggctgccggaggacagccgaggcgtaaaatagcgcccggtggacgaccggggtggtcagcacgcggccccctagaaactcggcatacagggcgtcgatgagatgggctgcgctgggcgccactgcgtcgtacgccgaggggctatccagcacgaaggccagctgatagcccagcgcgtgtaatgccaagctctgttcgcgctccagaatctcggccaccaggtgctggagccgagcctctagctgcaggcgggccgtgggatccaagactgacacattaaaaaacacagaatccgcggcacagcccgcggccccgcgggcggccaacccggcaagcgcgcgcgagtgggccaaaaagcctagcaggtcggagaggcagaccgcgccgtttgcgtgggcggcgttcacgaaagcaaaacccgacgtcgcgagcagccccgttaggcgccagaagagaggggggcgcgggccctgctcggcgcccgcgtcccccgagaaaaactccgcgtatgcccgcgacaggaactgggcgtagttcgtgccctcctccgggtagccgcccacgcggcggagggcgtccagcgcggagccgttgtcggcccgcgtcagggaccctaggacaaagacccgataccgggggccgcccgggggcccgggaagagcccccggggggttttcgtccgcggggtccccgacccgatctagcgtctggcccgcggggaccaccatcacttccaccggagggctgtcgtgcatggatatcacgagccccatgaattcccgcccgtagcgcgcgcgcaccagcgcggcatcgcacccgagcaccagctcccccgtcgtccagatgcccacgggccacgtcgaggccgacggggagaaatacacgtacctacctggggatctcaacaggccccgggtggccaaccaggtcgtggacgcgttgtgcaggtgcgtgatgtccagctccgtcgtcgggtgccgccgggccccaaccggcggtcgggggggcggtgtatcacgcggcccgcttgggtggctcgccgtcgccacgttgtctccccgcgggaacgtcagggcctcggggtcagggacggccgaaaacgttacccaggcccgggaacgcagcaacacggaggcgactggattgtacaagagacccttaaggggggcgaccgaggggggaggctgggcggtcggctcgaccgtggtgggggcgggcaggctcgcgttcgggggccggccgagcaggtaggtcttcgggatgtaaagcagctggccggggtcccgcggaaactcggccgtggtgaccaatacaaaacaaaagcgctcctcgtaccagcgaagaaggggcagagatgccgtagtcaggtttagttcgtccggcggcgccagaaatccgcgcggtggtttttgggggtcgggggtgtttggcagccacagacgcccggtgttcgtgtcgcgccagtacatgcggtccatgcccaggccatccaaaaaccatgggtctgtctgctcagtccagtcgtggacctgaccccacgcaacgcccaaaataataacccccacgaaccataaaccattccccatgggggaccccgtccctaacccacggggcccgtggctatggcagggcttgccgccccgacgttggctgcgagccctgggccttcacccgaacttggggggtggggtggggaaaaggaagaaacgcgggcgtattggccccaatggggtctcggtggggtatcgacagagtgccagccctgggaccgaaccccgcgtttatgaacaaacgacccaacacccgtgcgttttattctgtctttttattgccgtcatagcgcgggttccttccggtattgtctccttccgtgtttcagttagcctcccccatctcccgggcaaacgtgcgcgccaggtcgcagatcgtcggtatggagccgggggtggtgacgtgggtctggaccatcccggaggtaagttgcagcagggcgtcccggcagccggcgggcgattggtcgtaatccaggataaagacgtgcatgggacggaggcgtttggccaagacgtccaaggcccaggcaaacacgttgtacaggtcgccgttgggggccagcaactcgggggcccgaaacagggtaaataacgtgtccccgatatggggtcgtgggcccgcgttgctctggggctcggcaccctggggcggcacggccgtccccgaaagctgtccccaatcctcccgccacgacccgccgccctgcagataccgcaccgtattggcaagcagcccgtaaacgcggcgaatcgcggccagcatagccaggtcaagccgctcgccggggcgctggcgtttggccaggcggtcgatgtgtctgtcctccggaagggcccccaacacgatgtttgtgccgggcaaggtcggcgggatgagggccacgaacgccagcacggcctggggggtcatgctgcccataaggtatcgcgcggccgggtagcacaggagggcggcgatgggatggcggtcgaagatgagggtgagggccgggggcggggcatgtgagctcccagcctcccccccgatatgaggagccagaacggcgtcggtcacggcataaggcatgcccattgttatctgggcgcttgtcattaccaccgccgcgtccccggccgatatctcaccctggtcgaggcggtgttgtgtggtgtagatgttcgcgattgtctcggaagcccccagcacctgccagtaagtcatcggctcgggtacgtagacgatatcgtcgcgcgaacccagggccaccagcagttgcgtggtggtggttttccccatcccgtgaggaccgtctatataaacccgcagtagcgtgggcattttctgctccaggcggacttccgtggcttcttgctgccggcgagggcgcaacgccgtacgtcggttgctatggccgcgagaacgcgcagcctggtcgaacgcagacgcgtgttgatggcaggggtacgaagccatacgcgcttctacaaggcgcttgccgaagaggtgcgggagtttcacgccaccaagatctgcggcacgctgttgacgctgttaagcgggtcgctgcagggtcgctcggtgttcgaggccacacgcgtcaccttaatatgcgaagtggacctgggaccgcgccgccccgactgcatctgcgtgttcgaattcgccaatgacaagacgctgggcggggtttgtgtcatcatagaactaaagacatgcaaatatatttcttccggggacaccgccagcaaacgcgagcaacgggccacggggatgaagcagctgcgccactccctgaagctcctgcagtccctcgcgcctccgggtgacaagatagtgtacctgtgccccgtcctggtgtttgtcgcccaacggacgctccgcgtcagccgcgtgacccggctcgtcccgcagaaggtctccggtaatatcaccgcagtcgtgcggatgctccagagcctgtccacgtatacggtccccatggagcctaggacccagcgagcccgtcgccgccgcggcggcgccgcccgggggtctgcgagcagaccgaaaaggtcacactctggggcgcgcgacccgcccgagtcagcggcccgccagttaccacccgccgaccaaacccccgcctccacggagggcgggggggtgcttaagaggatcgcggcgctcttctgcgtgcccgtggccaccaagaccaaaccccgagccgcctccgaatgagagtgtttcgttccttccccctccccccgcgtcagacaaaccctaaccaccgcttaagcggcccccgcgaggtccgaagactcatttggatccggcgggagccacccgacaacagcccccgggttttcccacgccagacgccggtccgctgtgccatcgcgccccctcatcccaccccccatcttgtccccaaataaaacaaggtctggtagttaggacaacgaccgcagttctcgtgtgttattttcgctctccgcctctcgcagatggacccgtactgcccatttgacgctctggacgtctgggaacacaggcgcttcatagtcgccgattcccgaaacttcatcacccccgagttcccccgggacttttggatgtcgcccgtctttaacctcccccgggagacggcggcggagcaggtggtcgtcctacaggcccagcgcacagcggctgccgctgccctggagaacgccgccatgcaggcggccgagctccccgtcgatatcgagcgccggttacgcccgatcgaacggaacgtgcacaagatcgcaggcgccctggaggcgctggagacggcggcggccgccgccgaagaggcggatgccgcgcgcggggatgagccggcgggtgggggcgacgggggggcgcccccgagtctggccgtcgcggagatggaggtccagatcgtgcgcaacgacccgccgctacgatacgacaccaacctccccgtggatctgctacacatggtgtacgcgggccgcggggcgaccggatcgtcgggggtggtgttcgggacctggtaccgcactatccaggaccgcaccatcacggactttcccctgaccacccgcagtgccgactttcgggacggccgtatgtccaagaccttcatgacggcgctggtactgtccctgcagtcgtgcggccggctgtatgtgggccagcgccactattccgccttcgagtgcgccgtgttgtgtctctacctgctgtaccgaaacacgcacggggccgccgacgatagcgaccgcgctccggtcacgttcggggatctgctgggccggctgccccgctacctggcgtgcctggccgcggtgatcgggaccgagggcggccggccacagtaccgctaccgcgacgacaagctccccaagacgcagttcgcggccggcgggggccgctacgaacacggagcgctggcgtcgcacatcgtgatcgccacgctgatgcaccacggggtgctcccggcggccccgggggacgtcccccgggacgcgagcacccacgttaaccccgacggcgtggcgcaccacgacgacataaaccgcgccgccgccgcgttcctcagccggggccacaacctattcctgtgggaggaccagactctgctgcgggcaaccgcgaacaccataacggccctgggcgttatccagcggctcctcgcgaacggcaacgtgtacgcggaccgcctcaacaaccgcctgcagctgggcatgctgatccccggagccgtcccttcggaggccatcgcccgtggggcctccgggtccgactcgggggccatcaagagcggagacaacaatctggaggcgctatgtgccaattacgtgcttccgctgtaccgggccgacccggcggtcgagctgacccagctgtttcccggcctggccgccctgtgtcttgacgcccaggcggggcggccggtcgggtcgacgcggcgggtggtggatatgtcatcgggggcccgccaggcggcgctggtgcgcctcaccgccctggaactcatcaaccgcacccgcacaaaccccacccccgtgggggaggttatccacgcccacgacgccctggcgatccaatacgaacaggggcttggcctgctggcgcagcaggcacgcattggcttgggctccaacaccaagcgtttctccgcgttcaacgttagcagcgactacgacatgttgtactttttatgtctggggttcattccacagtacctgtcggcggtttagtgggtggtgggcgaggggggagggggcattagggagaaagaacaagagcctccgttgggttttctttgtgcctgtactcaaaaggtcataccccgtaaacggcgggctccagtcccggcccggcggttggcgtgaacgcaacggcgggagctgggttagcgtttagtttagcattcgctctcgcctttccgcccgccccccgaccgttgcgccttttttttttttcgtccaccaaagtctctgtgggtgcgcgcatggcagccgatgccccgggagaccggatggaggagcccctgccagacagggccgtgcccatttacgtggctgggtttttggccctgtatgacagcggggactcgggcgagttggcattggatccggatacggtgcgtgcggccctgcctccggataacccactcccgattaacgtggaccaccgcgctggctgcgaggtggggcgggtgctggccgtggtcgacgacccccgcgggccgttttttgtgggactgatcgcctgcgtgcaactggagcgcgtcctcgagacggccgccagcgctgcgattttcgagcgccgcgggccgccgctctcccgggaggagcgcctgttgtacctgatcaccaactacctgccctcggtctccctggccacaaaacgcctggggggcgaggcgcaccccgatcgcacgctgttcgcgcacgtcgcgctgtgcgcgatcgggcggcgcctcggcactatcgtcacctacgacaccggtctcgacgccgccatcgcgccctttcgccacctgtcgccggcgtctcgcgagggggcgcggcgactggccgccgaggccgagctcgcgctgtccggacgcacctgggcgcccggcgtggaggcgctgacccacacgctgctttccaccgccgttaacaacatgatgctgcgggaccgctggagcctggtggccgagcggcggcggcaggccgggatcgccggacacacctacctccaggcgagcgaaaaattcaaaatgtggggggcggagcctgtttccgcgccggcgcgcgggtataagaacggggccccggagtccacggacataccgcccggctcgatcgctgccgcgccgcagggtgaccggtgcccaatcgtccgtcagcgcggggtcgcctcgcccccggtactgccccccatgaaccccgttccggcatcgggcaccccggcccccgcgccgcccggcgacgggagctacctgtggatcccggcctcccattacaaccagctcgtcgccggccacgccgcgccccaaccccagccgcattccgcgtttggtttcccggctgcggcgggggccgtggcctatgggcctcacggcgcgggtctttcccagcattaccctccccacgtcgcccatcagtatcccggggtgctgttctcgggacccagcccactcgaggcgcagatagccgcgttggtgggggccatagccgcggaccgccaggcgggcggtcagacggccgcgggagaccctggggtccgggggtcgggaaagcgtcgccggtacgaggcggggccgtcggagtcctactgcgaccaggacgaaccggacgcggactacccgtactaccccggggaggctcgaggcgggccgcgcggggtcgactctcggcgcgcggcccgccagtctcccgggaccaacgagaccatcacggcgctgatgggggcggtgacgtctctgcagcaggaactggcgcacatgcgggctcggaccagcgccccctatggaatgtacacgccggtggcgcactatcgccctcaggtgggggagccggaaccaacaacgacccacccggccctttgtcccccggaggccgtgtatcgccccccaccacacagcgccccctacggtcctccccagggtccggcgtcccatgcccccactcccccgtatgccccagctgcctgcccgccaggcccgccaccgcccccatgtccttccacccagacgcgcgcccctctaccgacggagcccgcgttcccccccgccgccaccggatcccaaccggaggcatccaacgcggaggccggggcccttgtcaacgccagcagcgcagcacacgtggacgttgacacggcccgcgccgccgatttgttcgtctctcagatgatgggggcccgctgattcgccccggtctttggtaccatgggatgtcttactgtatatctttttaaataaaccaggtaataccaaataagacccattggtgtatgttctttttttattgggaggcgcgggtaggcgggtagctttacaatgcaaaagccttcgacgtggaggaaggcgtggggggggaatcggcactgaccaagggggtccgttttgtcacgggaaaggaaagaggaaacaggccgcggacacccgggggagtttatgtgttcccttttctttcttcccacacacacaaaaggcgtaccaaacaaacaaaccaaaagatgcacatgcggtttaacacccgtggtttttatttacaacaaaccccccgtcacaggtcgtcctcgtcggcgtcaccgtctttgttgggaacttgggtgtagttggtgttgcggcgcttgcgcatgaccatgtcggtgaccttggcgctgagcagcgcgctcgtgcccttcttcttggccttgtgttccgtgcgctccatggcagacaccagggccatgtaccgtatcatctcccgggcctcggctagcttggcctcgtcaaagtcgccgccctcctcgccctccccggacgcgtccgggttggtggggttcttgagctccttggtggttagcgggtacagggccttcatggggttgctctgcagccgcatgacgtagcgaaaggcgaagaaagccgccgccaggccggccaggaccaacagacccacggccagcgccccaaaggggttggacatgaaggaggacacgcccgacacggccgataccacgccgcccacgatgcccatcaccaccttgccgaccgcgcgccccaggtcgcccatcccctcgaagaacgcgcccaggcccgcgaacatggcggcgttggcgtcggcgtggatgaccgtgtcgatgtcggcgaagcgcaggtcgtgcagctggttgcggcgctggacctccgtgtagtccagcaggccgctgtccttgatctcgtggcgggtgtacacctccagggggacaaactcgtgatcctccagcatggtgatgttgaggtcgatgaaggtgctgacggtggtgatgtcggcgcggctcagctggtgggagtacgcgtactcctcgaagtacacgtagcccccgccgaaggtgaagtagcgccggtgtcccacggtgcacggctcgatcgcatcgcgcgtcagccgcagctcgttgttctcccccagctgcccctcgaccaacgggccctggtcttcgtaccgaaagctgaccagggggcggctgtagcaggccccgggccgcgagctgatgcgcatcgagttttggacgatcacgttgtccgcggcgaccggcacgcacgtggagacggccatcacgtcgccgagcatccgcgcgctcacccgccggcccacggtggccgaggcgatggcgttggggttcagcttgcgggcctcgttccacagggtcagctcgtgattctgcagctcgcaccacgcgatggcaacgcggcccaacatatcgttgacatggcgctgtatgtggttgtacgtaaactgcagccgggcgaactcgatggaggaggtggtcttgatgcgctccacggacgcgttggcgctggccccgggcggcgggggcgtggggtttgggggcttgcggctctgctctcggaggtgttcccgcacgtacagctccgcgagcgtgttgctgagaaggggctggtacgcgatcagaaagcccccattggccaggtagtactgcggctggcccaccttgatgtgcgtcgcgttgtacctgcgggcgaagatgcggtccatggcgtcgcgggcgtccttgccgatgcagtcccccaggtccacgcgcgagagcgggtactcggtcaggttggtggtgaaggtggtggatatggcgtcggaggagaatcggaaggagccgccgtactcggagcgcagcatctcgtccacctcctgccacttggtcatggtgcagaccgacgggcgctttggcacccagtcccaggccacggtgaacttgggggtcgtgagcaggttccgggtggtcggcgccgtggcccgggccttggtggtgaggtcgcgcgcgtagaagccgtcaacctgcttgaagcggtcggcggcgtagctggtgtgttcggtgtgcgacccctcccggtagccgtaaaacggggacatgtacacaaagtcgccagtcgccagcacaaactcgtcgtacgggtacaccgagcgcgcgtccacctcctcgacgatgcagtttaccgtcgtcccgtaccggtggaacgcctccacccgcgaggggttgtacttgaggtcggtggtgtgccagccccggctcgtgcgggtcgcggcgttggccggtttcagctccatgtcggtctcgtggtcgtcccggtgaaacgcggtggtctccaggttgttgcgcacgtacttggccgtggaccgacagacccccttggcgttgatcttgtcgatcacctcctcgaaggggacgggggcgcggtcctcaaagatccccataaactgggagtagcggtggccgaaccacacctgcgaaacggtgacgtctttgtagtacatggtggccttgaacttgtacggggcgatgttctccttgaagaccaccgcgatgccctccgtgtagttctgaccctcgggccgggtcgggcagcggcgcggctgctcgaactgcaccaccgtggcgcccgtggggggtgggcacacgtaaaagtttgcatcggtgttctccgccttgatgtcccgcaggtgctcgcgcagggtggcgtggcccgcggcgacggtcgcgttgtcgccggcggggcgcggcggcggtgggtttttcggttttttgttcttcttcggtttcgtgtcccccgttggggcggggccaggggcgggcggcgccggagtggcaggtcccccgttcgccgcctgggtcgcggccgcgaccccaggcgtgccgggggaactcggagccgccgacgccaccaggacccccagcgtcaaccccaagagcgcccatacgacgaaccaccggcacccccgcgcgggggcgccctggcgcatggcgggactacgggggcccgtcgtgccccccgtcaggtagcctgggggcgaggtgctggaggaccgagtagaggatcgagaaaacgtctcggtcgtagaccacgaccgaccgggggccgatacagccgtcgggggcgctctcgacgatggccaccagcggacagtcggagtcgtacgtgagatatacgccgggcgggtaacggtaacgaccttcggaggtcgggcggctgcagtccgggcggcgcaactcgagctccccgcaccggtagaccgaggcaaagagtgtggtggcgataatcagctcgcgaatatatcgccaggcggcgcgctgagtgggcgttattccggaaatgccgtcaaaacagtaaaacctctgaaattcgctgacggcccaatcagcacccgagccccccgcccccatgatgaaccgggcgagctcctccttcaggtgcggcaggagccccacgttctcgacgctgtaatacagcgcggtgttggggggctgggcgaagctgtgggtggagtgatcaaagaggggcccgttgacgagctcgaagaagcgatgggtgatgctggggagcagggccgggtccacctggtgtcgcaggagagacgctcgcatgaaccggtgcgcgtcgaacacgcccggcgccgagcggttgtcgatgaccgtgcccgcgcccgccgtcagggcgcagaagcgcgcgcgcgccgcaaagccgttggcgaccgcggcgaacgtcgcgggcagcacctcgccgtggacgctgacccgcagcatcttctcgagctccccgcgctgctcgcggacgcagcgccccaggctggccaacgaccgcttcgtcaggcggtccgcgtacagccgccgtcgctcccgcacgtccgcggccgcttgcgtggcgatgtccccccacgtctcgggcccctgccccccgggcccgcggcgacggtcttcgtcctcgcccccgcccccgggagctcccaacccccgtgccccttcctctacggcgacacggtccccgtcgtcgtcggggcccgcgccgcccttgggcgcgtccgccgcgccccccgcccccatgcgcgccagcacgcgacgcagcgcctcctcgtcgcactgttcggggctgacgaggcgccgcaagagcggcgtcgtcaggtggtggtcgtagcacgcgcggatgagcgcctcgatctgatcgtcgggtgacgtggcctgaccgccgattattagggcgtccaccatatccagcgccgccaggtggctcccgaacgcgcgatcgaaatgctccgcccgccgcccgaacagcgccagttccacggccaccgcggcggtctcctgctgcaactcgcgccgcgccagcgcggtcaggttgctggcaaacgcgtccatggtggtctggccggcgcggtcgccggacgcgagccagaatcgcaattcgctgatggcgtacaggccgggcgtggtggcctgaaacacgtcgtgcgcctccagcagggcgtcggcctccttgcggaccgagtcgttctcgggcgacgggtggggctgcccgtcgccccccgcggtccgggccagcgcatggtccaacacggagagcgcccgcgcgcggtcggcgtccgacagcccggcggcgtggggcaggtaccgccgcagctcgttggcgtccagccgcacctgcgcctgctgggtgacgtggttacagatacggtccgccaggcggcgggcgatcgtcgccccctggttcgccgtcacacacagttcctcgaaacagaccgcgcaggggtgggacgggtcgctaagctccggggggacgataaggcccgaccccaccgcccccaccataaactcccgaacgcgctccagcgcggcggtggcgccgcgcgagggggtgatgaggtggcagtagtttagctgctttagaaagttctcgacgtcgtgcaggaaacacagctccatatggacggtcccgccatacgtatccagcctgacccgttggtgatacggacagggtcgggccaggcccatggtctccgtgaaaaacaccgcgacgtctcccgcggtcgcgaacgtctccaggctgcccaggagccgctcgccctcgcgccacgcgtactctagcagcaactccagggtgaccgacagcggggtgagaaaggccccggcctgggcctccaggcccggcctcagacgacgccgcagcgcccgcacctgaagcgcgttcagcttcagttgggggagcttcccccgtccgatgtgggggtcgcaccgccggagcagctctatctgaaacacataggtctgcacctgtccgagcagggctaacaacttttgacgggccacggtgggctcggacaccggggcggccatctcgcggcgccgatctgtaccgcggccggagtatgcggtggaccgaggcggtccgtacgctacccggcgtctggctgagccccggggtccccctattcggggcggcctcccgcgggcccgccgaccggcaagccgggagtcggcggcgcgtgcgtttctgttctattcccagacaccgcggagaggaatcacggcccgcccagagatatagacacggaacacaaacaagcacggatgtcgtagcaataatttattttacacacattccccgccccgccctaggttcccccaccccccaacccctcacagcatatccaacgtcaggtctccctttttgtcggggggcccctccccaaacgggtcatccccgtggaacgcccgtttgcggccggcaaatgccggtcccggggcccccgggccgccgaacggcgtcgcgttgtcgtcctcgcagccaaaatccccaaagttaaacacctccccggcgttgccgagttggctgactagggcctcggcctcgtgcgccacctccagggccgcgtccgtcgaccactcgccgttgccgcgctccagggcacgtgcggtcagctccatcatctcctcgcttaggtactcgtcctccaggagcgccagccagtcctcgatctgcagctgttgggtgcggggccccaggcttttcacggtcgccacgaacacgctactggcgacggccgccccgccctcggagataatgccccggagctgctcgcacagcgagctttcgtgcgctccgccgccgaggctcgaggccgcgcacacaaacccggcccggggacaggccaggacgaacttgcgggtgcggtcaaaaataaggagcgggcacgcgtttttgccgcccatcaggctggcccagttcccggcctgaaacacacggtcgttgccggccatgccgtagtatttgctgatgctcaaccccaacacgaccatggggcgtgccgccatgacgggccgcagcaggttgcagctggcgaacatggaggtccacgcgcccggatgcgcgtccacggcgtccatcagcgcgcgggccccggcctccaggcccgccccgccctgcgcggaccacgcggccgccgcctgcacgctggggggacggcgggaccccgcgatgatggccgtgagggtgttgatgaagtacgtcgagtgatcgcagtaccgcagaatctggtttgccatgtagtacatcgccagctcgctcacgttgttgggggccaggttaataaagttgatcgcgccgtagtccagggaaaactttttaatgaacgcgatggtctcgatgtcctcgcgcgacaggagccgggcgggaagctggttgcgttggagggccgtccagaaccactgcgggttcggctggttggaccccgggggcttgccgttggggaagatggccgcgtggaactgcttcagcagaaagcccagcggtccgaggaggatgtccacgcgcttgtcgggcttctggtaggcgctctggaggctggcgacccgcgccttggcggcctcggacgcgttggcgctcgcgcccgcgaacaacacgcggctcttgacgcgcagctccttgggaaaccccagggtcacgcgggcaacgtcgccctcgaagctgctctcggcgggggccgtctggccggccgtcaggctgggggcgcagatagccgcaccctccgagagcgcgaccgtcagcgttttggccgacagaaacccgttgttaaacatgtccatcacgcgccgccgcagcaccggttggaattgattgcgaaagttgcgcccctcgaccgactgcccggcgaacaccccgtggcactggctcagggccaggtcctggtacacggcgaggttggatcgccgcccgagaagctgaagcagggggcacggcccgcacgcgtacgggtccagcgtcagggacatggcgtggttggcctcgcccagaccgtcgcgaaacttgaagttcctcccctccaccaggttgcgcatcagctgctccacctcgcggtccacgacctgcctgacgttgttcaccaccgtatgcagggcctcgcggttggtgatgatggtctccagccgccccatggccgtggggaccgcctggtccacgtactgcagggtctcgagttcggccatgacgcgctcggtcgccgcgcggtacgtctcctgcatgatggtccgggcggtctcggatccgtccgcgcgcttcagggccgagaaggcggcgtagtttcccagcacgtcgcagtcgctgtacatgctgttcatggtcccgaagacgccgatggctccgcgggcggcgctggcgaacttgggatggcgcgcccggaggcgcatgagcgtcgtgtgtacgcaggcgtggcgcgtgtcgaaggtgcacaggttacagggcacgtcggtctggttggagtccgcgacgtatcgaaacacgtccatctcctggcgcccgacgatcacgccgccgtcgcagcgctccaggtaaaacagcatcttggccagcagcgccggggaaaacccacacagcatggccaggtgctcgccggcaaattcctgggttccgccgacgaggggcgcggtgggccgaccctcgaacccgggcaccacgtgtccctcgcggtccacctgtgggttggccgccacgtgggtcccgggcacgaggaagaagcggtaaaaggagggtttgctgtggtcctttgggtccgccgggccggcgtcgtccacctcggtgagatggagggccgagttggtgctaaataccatggcccccacgagtcccgcggcgcgcgccaggtacgccccgacggcgttggcgcgggccgcggccgtgtcctggccctcgaacagcggccacgcggagatgtcggtgggcggctcgtcaaagacggccatcgacacgatagactcgagggccagggcggcgtctccggccatgacggaggccaggcgctgttcgaacccgcccgcagggcccttgccgccgccgtcgcgcccgccccgcggggtcttaccctggctggcttcgaaggccgtgaacgtaatgtcggcggggagggcggcgccctcgtggttttcgtcaaacgccaggtgggcggccgcgcgggccacggcgtccacgtttcggcatcgcagtgccacggcggcgggtcccacgaccgcctcgaacaggaggcggtggagggggcggttaaaaaacggaagcgggtaggtaaaattctccccgatcgatcggtggttggcgttgaacggctctgcgatgacacggctaaaatccggcatgaacagctgcaacgggtacacgggtatgcggtgcacctccgccccgcctatggttaccttgtccgagcctcccaggtgcagaaaggtgttgttgatgcacacggcctccttgaagccctcggtaacgaccagatacaggagggcgcggtccgggtccaggccgaggcgctcacacagcgcctcccccgtcgtctcgtgtttgaggtcgccgggccggggggtgtagtccgaaaagccaaaatggcggcgtgcccgctcgcagagtcgcgtcaggttcggggcctgggtgctggggtccaggtgccggccgccgtgaaagacgtacacggacgagctgtagtgcgagggcgtcagtttcagggacaccgcggtacccccgagccccgtcgtgcgagaacccacgaccacggccacgttggcctcaaagccgctctccacggtcaggcccacgaccaggggcgccacggcgacgtcggcatcgccgctgcgcgccgacagtaacgccagaagctcgatgccttcggacggacacgcgcgagcgtacacgtatcccaggggcccgggggggaccttgatggtggttgccgtcttgggctttgtctccatgtccttctgtcaatcggtccgcgaacggaggtaatcccggcacgacgacggacgcccgacaaggtatgtctcccgagcgtcaaaatccgggggggggggcggcgacggtcaaggggagggttggagaccggggttggggaatgaatccctacccttcaccgacaaccccccgggtaatcacggggtgccgatgaaccccggcggccggcaacgcggggtccctgcgagaggcacagatgcttacggtcaggtgctccgggtcgggtgcgtctggtatgcggttggtatatgtacactttacctgggggcgtgcctggccgccccagcccctcccacgccctgcgcgtcatcagccggtgggcgtggccgctattataaaaaaagtgagaacgcgaagcgttcgcactttgtcctaataatatatatattattaggacaaagtgcgaacgcttcgcgttctcactttttttataatagcggccacgcccaccggctacgtcacgctcctgtcggccgccggcggtccataagcccggccggccgggccgacgcgaataaaccgggccgccggccggggcgccgcgcagcagctcgccgcccggatccgccagacaaacaaggcccttgcacatgccggcccgggcgagcctgggggtccggtaattttgccatcccacccaagcggctttttgggtttttctcttcccccctccccacatcccccctctttaggggttcgggtggtaacaaccgcgatgttttccggtggcggcggcccgctgtcccccggaggaaagtcggcggccagggcggcgtccgggttttttgcgcccgccggccctcgcggagccggccggggacccccgccttgcttgaggcaaaacttttacaacccctacctcgccccagtcgggacgcaacagaagccgaccgggccaacccagcgccatacgtactatagcgaatgcgatgaatttcgattcatcgccccgcgggtgctggacgaggatgcccccccggagaagcgcgccggggtgcacgacggtcacctcaagcgcgcccccaaggtgtactgcgggggggacgagcgcgacgtcctccgcgtcgggtcgggcggcttctggccgcggcgctcgcgcctgtggggcggcgtggaccacgccccggcggggttcaaccccaccgtcaccgtctttcacgtgtacgacatcctggagaacgtggagcacgcgtacggcatgcgcgcggcccagttccacgcgcggtttatggacgccatcacaccgacggggaccgtcatcacgctcctgggcctgactccggaaggccaccgggtggccgttcacgtttacggcacgcggcagtacttttacatgaacaaggaggaggtcgacaggcacctacaatgccgcgccccacgagatctctgcgagcgcatggccgcggccctgcgcgagtccccgggcgcgtcgttccgcggcatttccgcggaccacttcgaggcggaggtggtggagcgcaccgacgtgtactactacgagacgcgccccgctctgttttaccgcgtctacgtccgaagcgggcgcgtgctgtcgtacctgtgcgacaacttctgcccggccatcaagaagtacgagggtggggtcgacgccaccacccggttcatcctggacaaccccgggttcgtcaccttcggctggtaccgtctcaaaccgggccggaacaacacgctagcccagccgcgggccccgatggccttcgggacatccagcgacgtcgagtttaactgtacggcggacaacctggccatcgaggggggcatgagcgacctaccggcatacaagctcatgtgcttcgatatcgaatgcaaggcggggggggaggacgagctggcctttccggtggccgggcacccggaggacctggtcatccagatatcctgtctgctctacgacctgtccaccaccgccctggagcacgtcctcctgttttcgctcggttcctgcgacctccccgaatcccacctgaacgagctggcggccaggggcctgcccacgcccgtggttctggaattcgacagcgaattcgagatgctgttggccttcatgacccttgtgaaacagtacggccccgagttcgtgaccgggtacaacatcatcaacttcgactggcccttcttgctggccaagctgacggacatttacaaggtccccctggacgggtacggccgcatgaacggccggggcgtgtttcgcgtgtgggacataggccagagccacttccagaagcgcagcaagataaaggtgaacggcatggtgaacatcgacatgtacgggattataaccgacaagatcaagctctcgagctacaagctcaacgccgtggccgaagccgtcctgaaggacaagaagaaggacctgagctatcgcgacatccccgcctactacgccgccgggcccgcgcaacgcggggtgatcggcgagtactgcatacaggattccctgctggtgggccagctgttttttaagtttttgccccatctggagctctcggccgtcgcgcgcttggcgggtattaacatcacccgcaccatctacgacggccagcagatccgcgtctttacgtgcctgctgcgcctggccgaccagaagggctttattctgccggacacccaggggcgatttaggggcgccgggggggaggcgcccaagcgtccggccgcagcccgggaggacgaggagcggccagaggaggagggggaggacgaggacgaacgcgaggagggcgggggcgagcgggagccggagggcgcgcgggagaccgccggccggcacgtggggtaccagggggccagggtccttgaccccacttccgggtttcatgtgaaccccgtggtggtgttcgactttgccagcctgtaccccagcatcatccaggcccacaacctgtgcttcagcacgctctccctgagggccgacgcagtggcgcacctggaggcgggcaaggactacctggagatcgaggtgggggggcgacggctgttcttcgtcaaggctcacgtgcgagagagcctcctcagcatcctcctgcgggactggctcgccatgcgaaagcagatccgctcgcggattccccagagcagccccgaggaggccgtgctcctggacaagcagcaggccgccatcaaggtcgtgtgtaactcggtttacgggttcacgggagtgcagcacggactcctgccgtgcctgcacgttgccgcgacggtgacgaccatcggccgcgagatgctgctcgcgacccgcgagtacgtccacgcgcgctgggcggccttcgaacagctcctggccgatttcccggaggcggccgacatgcgcgcccccgggccctattccatgcgcatcatctacggggacacggactccatctttgtgctgtgccgcggcctcacggccgccgggctgacggccgtgggcgacaagatggcgagccacatctcgcgcgcgctgtttctgtcccccatcaaactcgagtgcgaaaagacgttcaccaagctgctgctgatcgccaagaaaaagtacatcggcgtcatctacgggggtaagatgctcatcaagggcgtggatctggtgcgcaaaaacaactgcgcgtttatcaaccgcacctccagggccctggtcgacctgctgttttacgacgataccgtatccggagcggccgccgcgttagccgagcgccccgcagaggagtggctggcgcgacccctgcccgagggactgcaggcgttcggggccgtcctcgtagacgcccatcggcgcatcaccgacccggagagggacatccaggactttgtcctcaccgccgaactgagcagacacccgcgcgcgtacaccaacaagcgcctggcccacctgacggtgtattacaagctcatggcccgccgcgcgcaggtcccgtccatcaaggaccggatcccgtacgtgatcgtggcccagacccgcgaggtagaggagacggtcgcgcggctggccgccctccgcgagctcgacgccgccgccccaggggacgagcccgccccccccgcggccctgccctccccggccaagcgcccccgggagacgccgttgcatgccgaccccccgggaggcgcgtccaagccccgcaagctgctggtgtccgagctggccgaggatcccgcatacgccattgcccacggcgtcgccctgaacacggactattacttctcccacctgttgggggcggcgtgcgtgacattcaaggccctgtttgggaataacgccaagatcaccgagagtctgttaaaaaggtttattcccgaagtgtggcaccccccggacgacgtggccgcgcggctccgggccgcagggttcggggcggtgggtgccggcgctacggcggaggaaactcgtcgaatgttgcatagagcctttgatactctagcatgagccccccgtcgaagctgatgtccctcattttacaataaatgtctgcggccgacacggtcggaatctccgcgtccgtgggtttctctgcgttgcgccggaccacgagcacaaacgtgctctgccacacgtgggcgacgaaccggtaccccgggcacgcggtgagcatccggtctatgagccggtagtgcaggtgggcggacgtgccgggaaagatgacgtacagcatgtggcccccgtaagtggggtccgggtaaaacaacagccgcgggtcgcacgccccgcctccgcgcaggatcgtgtggacgaaaaaaagctcgggttggccaagaatcccggccaagaggtcctggaggggggcgttgtggcggtcggccaacacgaccaaggaggccaggaaggcgcgatgctcgaatatcgtgttgatctgctgcacgaaggccaggattagggcctcgcggctggtggcggcgaaccgcccgtctcccgcgttgcacgcgggacagcaacccccgatgcctaggtagtagcccatcccggagagggtcaggcagttgtcggccacggtctggtccagacagaagggcagcgagacgggagtggtcttcaccaggggcaccgagagcgagcgcacgatggcgatctcctcggagggcgtctgggcgagggcggcgaaaaggccccgatagcgctggcgctcgtgtaaacacagctcctgtttgcgggcgtgaggcggcaggctcttccgggaggcccgacgcaccacgcccagagtcccgccggccgcagaggagcgcgaccgccggcgctccttgccgtgatagggcccgggccgggagccgcggcgatgggggtcggtgtcatacataggtacacagggtgtgctccagggacaggagcgagatcgagtggcgtctaagcagcgcgcccgcctcacggacaaatgtggcgagcgcggtgggctttggtacaaatacctgatacgtcttgaaggtgtagatgagggcacgcaacgctatgcagacacgcccctcgaactcgttcccgcaggccagcttggccttgtggagcagcagctcgtcgggatgggtggcggggggatggccgaacagaacccaggggtcaacctccatctccgtaatggcgcacatggggtcacagaacatgtgcttaaagatggcctcgggccccgcggcccgaagcaggctcacaaaccggcccccgtccccgggctgcgtctcggggtcagcctcgagctggtcgacgacgggtacgatacagtcgaagaggctcgtgttgttttccgagtagcggaccacggaggcccggagtctgcgcagggccagccagtaagcacgcaccagtaacaggttacacagcaggcattctccgccggtgcgcccgcgcccccggccgtgtttcagcacggtggccatcagagggcccaggtcgaggtcgggctgggcatcgggttcggtaaactgcgcaaagcgcggagccacgtcgcgcgtgcgtgccccgcgatgcgcttcccaggactggcggaccgtggcgcgacgggcctccgcggcagcgcgcagctggggccccgactcccagacggcgggggtgccggcgaggagcagcaggaccagatccgcgtacgcccacgtatccggcgactcctccggctcgcggtccccggcgaccgtctcgaattccccgttgcgagcggcggcgcgcgtacagcagctgtccccgcccccgcgccgaccctccgtgcagtccaggagacgggcgcaatccttccagttcatcagcgcggtggtgagcgacggctgcgtgccggatcccgccgaccccgccccctcctcgcccccggaggccaaggttccgatgagggcccgggtggcagactgcgccaggaacgagtagttggagtactgcaccttggcggctcccggggagggcgagggcttgggttgcttctgggcatgccgcccgggcaccccgccgtcggtacggaagcagcagtggagaaaaaagtgccggtggatgtcgtttatggtgagggcaaagcgtgcgaaggagccgaccagggtcgccttcttggtgcgcagaaagtggcggtccatgacgtacacaaactcgaacgcggccacgaagatgctagcggcgcagtggggcgcccccaggcatttggcacagagaaacgcgtaatcggccacccactgaggcgagaggcggtaggtttgcttgtacagctcgatggtgcggcagaccagacagggccggtccagcgcgaaggtgtcgatggccgccgcggaaaagggcccggtgtccaaaagcccctccccacagggatccgggggcgggttgcggggtcctccgcgcccgcccgaaccccctccgtcgcccgcccccccgcgggcccttgagggggcggtgaccacgtcggcggcgacgtcctcgtcgagcgtaccgacgggcggcacacctatcacgtgactggccgtcaggagctcggcgcagagagcctcgttaagagccaggaggctgggatcgaaggccacatacgcgcgctcgaacgcccccgccttccagctgctgccgggggactcttcgcacaccgcgacgctcgccaggaccccggggggcgaagttgccatggctgggcgggaggggcgcacgcgccagcgaactttacgggacacaatccccgactgcgcgctgcggtcccagaccctggagagtctagacgcgcgctacgtctcgcgagacggcgcgcatgacgcggccgtctggttcgaggatatgacccccgccgagctggaggttgtcttcccgactacggacgccaagctgaactacctgtcgcggacgcagcggctggcctccctcctgacgtacgccgggcctataaaagcgcccgacgacgccgccgccccgcagaccccggacaccgcgtgtgtgcacggcgagctgctcgcccgcaagcgggaaagattcgcggcggtcattaaccggttcctggacctgcaccagattctgcggggctgacgcgcgtgctgttgggcgggacggttcgcgaaccctttggtgggtttacgcgggcacgcacgctcccatcgcgggcgccatggcgggactgggcaagccctacaccggccacccaggtgacgccttcgagggtctcgttcagcgaattcggcttatcgtcccatctacgttgcggggcggggacggggaggcgggcccctactctccctccagcctcccctccaggtgcgcctttcagtttcatggccatgacgggtccgacgagtcgtttcccatcgagtatgtactgcggcttatgaacgactgggccgaggtcccgtgcaacccttacctgcgcatacagaacaccggcgtgtcggtgctgtttcaggggttttttcatcgcccacacaacgcccccgggggcgcgattacgccagagcggaccaatgtgatcctggggtccaccgagacgacggggttgtccctcggcgacctggacaccatcaaggggcggctcggcctggatgcccggccgatgatggccagcatgtggatcagctgctttgtgcgcatgccccgcgtgcagctcgcgtttcggttcatgggccccgaagatgccggacggacgagacggatcctgtgccgcgccgccgagcaggctattacccgtcgccgccgaacccggcggtcccgggaggcgtacggggccgaggccgggctgggggtggccggaacgggtttccgggccaggggggacggttttggcccgctccccttgttaacccaagggccctcccgcccgtggcaccaggccctgcggggtcttaagcacctacggattggcccccccgcgctcgttttggcggcgggactcgtcctgggggccgctatttggtgggtggttggtgctggcgcgcgcctataaaaaaggacgcaccgccgccctaatcgccagtgcgttccggacgccttcgccccacacagccctcccgaccgacacccccatatcgcttcccgacctccggtcccgatggccgtcccgcaatttcaccgccccagcaccgttaccaccgatagcgtccgggcgcttggcatgcgcgggctcgtcttggccaccaataactctcagtttatcatggataacaaccacccacacccccagggcacccaaggggccgtgcgggagtttctccgcggtcaggcggcggcactgacggaccttggtctggcccacgcaaacaacacgtttaccccgcagcctatgttcgcgggcgacgcaccggccgcctggttgcggcccgcgtttggcctgcggcgcacctattcaccttttgtcgttcgagaaccttcgacgcccgggaccccgtgaggcccagggagttccttctggggtgttttaatcaataaaagaccacaccaacgcacgagccttgcgtttaatgtcgtgtttattcaagggagtgggatagggttcgacggttcgaaacttaacacaccaaataatcgagcgcgtctagcccagtaacatgcgcacgtgatgtaggctggtcagcacggcgtcgctgtgatgaagcagcgcccggcgggtccgctgtaactgctgttgtaggcggtaacaggcgcggatcagcaccgccagggcgctacgaccggtgcgttgcacgtagcgtcgcgacagaactgcgtttgccgatacgggcggggggccgaattgtaagcgcgtcacctcttgggagtcatcggcggataacgcactgaatggttcgttggttatgggggagtgtggttccccagggagtgggtcgagcgcctcggcctcggaatccgagaggaacaacgaggtggcgtcggagtcttcgtcgtcagagacatacagggtctgaagcagcgacacgggcgggggggtagcgtcgatgtgtagcgcgagggaggatgcccacgaagacaccccagacaaggagctgcccgtgcgtggatttgtggaagacgcggaagccgggacggatgggcggttttgcggtgcccggaaccgaaccgccggatactccccgggtgctacatgcccgttttggggctggggttggggctggggttggggctggggttggggctggggttggggctggggttggggctggggttggggttggggttggggctggggttggggttggggctggggctggggctggggctggggctggggctggggctggggctggggctggggctggggctggggctggggctggggctggggctggggctggggttggggcgcggacaggcggctgacggtcaaatgcccccgggggcgcgcagatgtggtgggcgtggccaccggctgccgtgtagtggggcggcgggaaaccgggcctccgggcgtaacaccgccctccagcgtcaagtatgtggggggcgggcctgacgtcgggggcggggtgacgggttggaccgcgggaggcgggggagagggacctgcgggagaggatgaggtcggctcggccgggttgcggcctaaaacaggggccgtggggtcggcggggtcccagggtgaagggagggattcccgcgattcggacagcgacgcgacagcggggcgcgtaaggcgccgctgcggcccgcctacgggaaccctggggggggttggcgcgggacccgaggttagcggggggcggcggttttcgcccccgggcaaaaccgtgccggttgcgaccgggggcggaacgggatcgatagggagagcgggagaagcctggccggcggactggggaccgagcgggaggggcacaccagacaccaaagcgtggggcgctggctctgggggtttgggaggggccggggggcgcgcgaaatcggtaaccggggcgaccgtgtcggggagggcaggcggccgccaaccctgggtggtcgcggaagcctgggtggcgcgcgccagggagcgtgcccggcggtgtcggcgcgcgcgcgacccggacgaagaagcggtagaagcgcgggaggaggcgggggggcggggggcggtggcatcggggggcgccggggaactttggggggacggcaagcgccggaagtcgtcgcgggggcccacgggcgccggccgcgtgctttcggccgggacgcccggtcgtgcttcgcgagccgtgactgccggcccagggggccgcggtgcacactgggacgtggggacggactgatcggcggtgggcgaaagggggtccggggcaaggaggggcgcggggccgccggagtcgtcagacgcgagctcctccaggccgtgaatccatgcccacatgcgaggggggacgggctcgccgggggtggcgtcggtgaatagcgtgggggccaggcttccgggccccaacgagccctccgccccaacaaggtccgccgggccgggggtcgggttcgggaccgaggggctctggtcgtcgggggcgcgctggtacaccggatgccccgggaatagctcccccgacaggagggaggcgtcgaacggccgcccgaggatagctcgcgcgaggaaggggtcctcgtcggtggcgctcgcggcgaggacgtcctcgccgcccgccacaaacgggagctcctcggtggcctcgctgccaacaaaccgcatgtcgggggggccgggggggtccgggttttcccacaacaccgcgaccggggtcatggagatgtccacgagcaccaggcacggcgggccccgggcgaggggccgctcggcgatgagcgcggacaggcgcgggagctgtgccgccagacacgcgttttcgatcgggttaaggtcggcgtgcaggaggcggacggcccacgtctcgatgtcggacgacacggcatcgcgcaaggcggcgtccggcccgcgagcgcgtgagtcaaacagcgtgaggcacagctccagttccgactcgcgggaaaaggccgtggtgttgcggagcgccacgacgacgggcgcgcccaggagcactgccgccagcaccaggtccatggccgtaacgcgcgccgcgggggtgcggtgggtggcggcggccggcacggcgacgtgctggcccgtgggccggtagagggcgttggggggagcggggggtgacgcctcgcgcccccccgaggggctcagcgtctgcccagattccagacgcgcggtcagaagggcgtcgaaactgtcatactctgtgtagtcgtccggaaacatgcaggtccaaagagcggccagcgcggtgcttgggagacacatgcgcccgaggacgctcaccgccgccagcgcctgggcgggactcagctttcccagcgcggcgccgcgctcggttcccagctcggggaccgagcgccagggcgccagggggtcggtttcggacaacttgccgcggcgccagtctgccagccgcgtgccgaacatgaggccccgggtcggagggcctccggccgaaaacgctggcagcacgcggatgcgggcgtctggatgcggggtcaggcgctgcacgaatagcatggaatctgctgcgttctgaaacgcacgggggagggtgagatgcatgtactcgtgttggcggaccagatccaggcgccaaaaggtgtaaatgtgttccggggagctggccaccagcgccaccagcacgtcgttctcgttaaaggaaacgcggtgcctagtggagctctggggtccgagcggcggccccggggccgccgcgtcacccccccattccagctgggcccagcgacacccaaactcgcgcgtgagagtggtcgcgacgagggcgacgtagagctcggccgccgcatccatcgaggccccccatctcgcctggcggtggcgcacaaagcgtccgaagagctgaaagttggcggcctgggcgtcgctgagggccagctgaagccggttgatgacggtgaggacgtacatggccgtgacggtcgaggccgactccagggtgtccgtcggaagcggggggcgaatgcatgccgcctcgggacacatcagcagcgcgccgagcttgtcggtcacggccgggaagcagagcgcgtactgcagtggcgttccatccgggaccaaaaagctgggggcgaacggcctatccagcgtactggtggcctcgcgcagcaccaggggccccgggcctccgctcactcgcaggtacgcctcgccccggcggcgcagcatctgcgggtcggcctcttggccgggtggggcggacgcccgggcgcgggcgtctagggcgcgaagatccacgagcaggggcgcgggcgcggccgccgcgcccgcgcccgtctggcctgtggccttggcgtacgcgctatataagcccatgcggcgttggatgagctcccgcgcgccccggaactcctccaccgcccatggggccaggtccccggccaccgcgtccaattccgccaacaggccccccagggtgtcaaagttcatctcccaggccacccttggcaccacctcgtcccgcagccgggcgctcaggtcggcgtgttgggccacgcgccccccgagctcctccacggccccggcccgctcggcgctcttggcgcccaggacgccctggtacttggcgggaaggcgctcgtagtcccgctgggctcgcagccccgacacagtgttggtggtgtcctgcagggcgcgaagctgctcgcatgccgcgcgaaatccctcgggcgatttccaggcccccccgcgaacgcggccgaagcgaccccatacctcgtcccactccgcctcggcctcctcgaaagacctccgcagggcctcgacgcggcgacgggtgtcgaagagcgactgcaggcgcgcgccctgtcgcgtcaggaggcccgggccgtcgccgctggccgcgcttagcgggtgcgtctcaaaggtgcgctgggcatgttccaaccaggcgaccgcctgcacgtcgagctcgcgcgccttctccgtctggtccaacagaatctcgacctgatccgcgatctcctccgccgagcgcgcctggtccagcgtcttggccacggtcgccgggacggcaaccaccttcagcagggtcttcagattggccagaccctcggcctcgagctgggcccggcgctcgcgcgcggccagcacctcccgcaaccccgccgtgacccgctcggtggcttcggcgcgctgctgtttggcgcgcaccacggcgtccttggtatcggccaggtcctgtcgggtcacgaatgcgacgtagtcggcgtacgccgtgtccttcacggggctctggtccacgcgctccagcgccgccacacacgccaccagcgcgtcctcgctcgggcagggcagggtgacccctgcccggacaagctcggcggccgccgccgggtcgttgcgcaccgcggatatctcctccgcggcggcggccaggtccagcgccacgcttccgatcgcgcgccgcgcgtcggcccggagggcgtccaggcgatcgcggatatccacgtactcggcgtagcccttttgaaaaaacggcacgtactggcgcagggccggcacgccccccaagtcttccgacaggtgtaggacggcctcgtggtagtcgataaacccgtcgttcgcctgggcccgctccagcagcccccccgcgagccgcagaagccgcgccaggggctcggtgtccacccgaaacatgtcggcgtacgtgtcggccgcggccccgaaggccgcgctccagtcgatgcggtgaatggctgcgagcggggggagcatggggtggcgctggttctcgggggtgtatgggttaaacgcaagggccgtctccagggcaagggtcaccgccttggcgttggttcccagcgcctgctcggcccgctttcggaagtcccgggggttgtagccgtgcgtgcccgccagcgcctgcaggcgacggagctcgaccacgtcaaactcggcaccgctttccacgcggtccagcacggcctccacgtcggcggcccagcgctcgtggctactgcgggcgcgctgggccgccatcttctctctgaggtcggcggtggcggcctcaagttcgtcggcgcggcgtcgcgtggcgccgatgacctttcccagctcctgcagggcgcgcccgctgggggagtggtccccggccgtcccttcggcgtgcaacaggcccccgaacctgccctcgtggcccgcgaggctttcccgcgcgccggtggtcgcgcgcgtcgcggcctggatcagggaggcatgctctccctccggttggttggcggcccggcgcacctggacgacaaggtcggcggcagccgaccctaaggtcgtgagctgggcgatggccccccgcgcgtccagggccaaccgagtcgccttgacgtatcccgcggcgctgtcggccatggccgctaggaaggccaggggggaggccgggtcgctggcggccgcgcccagggccgtcactgcgtcgaccaggacgcggtgcgcccgcacggccgcatccaccgtcgacgcggggtctgccgtcgcgacggcggcgctgccggcgttgatggcgttcgagacggcgtgggctatgatcggggcgtgatcggcgaagaactgcaagagaaacggagtctcgggggcgttggcgaacaggttcttcagcaccaccacgaagctgggatgcaagccggacagagccgtcgccgtgtccggagtcgggtgctccagggcatctcggtactgccccagcagcccccacatgtccgcccgcagcgccgccgtaacctccgggggcgccccccgaacggcctcggggaggtccgaccagcccgccggcagggaggcccgcagggtcgtcaggacggccggacaggcctttagccccacaaagtcagggaggggccgcaggaccccctggagtttgtgcaagaacttctcccgggcgtcgcgggccaccttcgcccgctcccgcgctccctcgagcattgcctccagggagcgcgcgcgctcccgcaaacgggcacgcgcatcgggggcgagctctgccgtcagcttggcggcatccatggcccgcgcctgccgcagcgcttcctcggccatgcgcgtggcctctggcgacagcccgccgtcgtcggggtagggcgacgcgccgggcgcaggaacaaaggccgcgtcgctgtccagctgctggcccagggccgcatctagggcgtcgaagcgccgcagctcggccagacccgagctgcggcgcgcctgctggtcgttaatgtcgcggatgctgcgcgccagctcgtccagcggcttgcgttctatcagcccttggttggcggcgtccgtcaggacggagagccaggccgccaggtcctcgggggcgtccagcgtctggccccgctgtatcagatcccgcaacaggatggccgtggggctggtcgcgatcgggggcggggcgggaatggcggcgctctgcgcgatgtcccgcgtgtgctggtcgaagacaggcagggactctagcagctggaccacgggcacgacggcggccgaagccacgtgaaaccggcggtcgttgttgtcgctggcctgcagagccttggcgctgtatacggccccccggtaaaagtactccttaaccgcgccctcgatcgcccgacgggcctgggtccgcacctcctccagccgaacctgaacggcctcggggcccagggggggtgggcgcggagccccctgcggggccgccccggccggggcgggcattacgccgaggggcccggcgtgctgtgagaccgcgtcgaccccgcgagcgagggcgtcgagggcctcgcgcatctggcgatcctccgcctccaccctaatctcttcgccacgggcaaatttggccagagcctggactctatacagaagcggttctgggtgcgtcggggtggcgggggcaaaaagggtgtccgggtgggcctgcgagcgctccagaagccactcgccgaggcgtgtatacagattggccggcggggccgcgcgaagctgcagctccaggtccgcgagttccccgtaaaaggcgtccgtctcccgaatgacatccctagccacaaggatcagcttcgccagcgccaggcgaccgatcagagagttttcgtccagcacgtgctggacgaggggcagatgggcggccacgtcggccaggctcaggcgcgtggaggccagaaagtcccccacggccgttttccggggcagcatgctcagggtaaactccagcagggcggcggccgggccggccaccccggcctgggtgtgcgtccgggccccgttctcgatgagaaaggcgaggacgcgttcaaagaaaaaaataacacagagctccagcagccccggagaagccggatacggcgaccgtaaggcgctgatggtgagccgcgaacacgcggcgacctcgcgggccagggcggcggagcacgcggtgaacttaaccgccgtggcggccacgtttgggtgggcctcgaacagctgggcaaggtctgcgcccgggggctcgggtgagcggcgagtcttcagcgcctcgagggcctgcgaggacgccggaaccgtgggcccgtcgtcctcgcccgcctcggcgaccggcggcccggccgggtcggggggtgccgaggcgaggacaggctccggaacggaggcggggaccgcggccccgacgggggttttgcctttgggggtggatttcttcttggttttggcagggggggccgagcgtttcgttttctcccccgaagtcaggtcttcgacgctggaaggcggagtccaggtgggtcggcggcgcttgggaaggccggccgagtagcgtgcccggtgccgaccaaccgggacgacgcccatctccaggacccgcatgtcgtcgtcatcttcttcggccgcctctgcggcggggggcttgggggcggagggaggcggtggtgggatcgcggagggtgggtcggcggaggggggatccgtgggtggggtacccttcagggccaccgcccatacatcgtcgggcgcccgattcgggcgcttggcctctggttttgccgacggaccggccgtcccccgggatgtctcggaggccctgtcgtcgcgacgggcccgggtcggtggcggcgactgggcggctgtgggcgggtggggccccgtgccccctaccccctcccgggggcccacgccgacgcagggctcccccaggcccgcgatctcgccccgcagggggtgcgtgatggccacgcgccgttcgctgaacgcttcgtcctgcaggtaagtctcgctggccccgtaaagatgcagagccgcggccgtcaagtccgcaggagccgcgggttccgggcccgacggcacgaaaaacaccatggctcccgcccaccgtacgtccgggcgatcgcgggtgtaatacgtcaggtatggatacatgtcccccgcccgcactttggcgatgaacgcgggggtgccctccggaaggccgtgcgggtcaaaaaggtatgcggtgtcgccgtccctgaacagccccatccctagggggccaatggttaggagcgtgtacgacagggggcgcagggcccacgggccggcgaagaacgtgtgtgcggggcattgtgtctccagcaggcccgccgcgggctccccgaagaagcccacctcgccgtatacgcgcgagaagacacagcgcagtccgccgcgcgcccctgggtactcgaggaagttggggagctcgacgatcgaacacatgcgcggcggcccagggcccgcggtcgcgcgcgtccactcgcccccctcgaccaaacaaccctcgatggcctccgcggacagaacgtcgcgagggcccacatcaaatatgaggctgagaaaggacagcgacgagcgcatgcacgataccgacccccccggctccaggtcgggcgcgaactggttccgagcaccggtgaccacgatgtcgcgatcccccccgcgttccatcgtggagtgcggtggggtgcccgcgatcatatgtgccctactggccagagacccggcctgtttatggaccggacccccggggttagtgttgtttccgccacccatgcccccgtaccatggccccggttcccctgattaggctacgagtcgcggtgatcgcttcccaaaaaccgagctgcgtttgtctgtcttgatctttcccccccccgcccgcccgcccgcccgcacaccataacaccgagaacaacacacgggggtgggcgtaacataataaagctttattggtaactagttaacggcaagtccgtgggtggcgcgacggtgtcctccgggctcatctcgtcgtcctcgacgggggtgttggaatgaggcgccccctcgcggtccgcctggcgtgggccgtgcccataggcctccggcttctgtgcgtccatgggcataggcgcggggagactgtttccggcgtcgcggacctccaggtccctgggagactccggtccggctaacggacgaaacgcggaagcgcgaaacacgccgtcggtgacccgcaggagctcgttcatcagtaaccaatccatactcagcgtaacggccagcccctggcgagacagatccacggagtccggaaccgcggtcgtctggcccagggggccgaggctgtagtccccccaggcccctaggtcgcgacggctcgtaagcacgacgcggtcggccgcggggctttgcgggggggcgtcctcgggcgcatgcgccattacctctcggatggccgcggcgcgctggtcggccgagctgaccaagggcgccacgaccacggcgcgctccgtctgcaggcccttccacgtgtcgtggagttcctggacaaactcggccacgggctcgggtcccgcggccgcgcgcgcggcttgatagcaggccgagagacgccgccagcgcgctagaaactgacccatgaagcaaaacccggggacctggtctcccgacagcagcttcgacgcccgggcgtgaatgccggacacgacggacagaaacccgtgaatttcgcgccggaccacggccagcacgttgtcctcgtgcgacacctgggccgccagctcgtcgcacacccccaggtgcgccgtggtttcggtgatgacggaacgcaggctcgcgagggacgcgaccagcgcgcgcttggcgtcgtgatacatgctgcagtactgactcaccgcgtcccccatggcctcggggggccagggccccaggcggtcgggcgtgtccccgaccaccgcatacaggcggcgcccgtcgctctcgaaccgacactcgaaaaaggcggagagcgtgcgcatgtgcagccgcagcagcacgatggcgtcctccagttggcgaatcagggggtctgcgcgctcggcgaggtcctgcagcaccccccgggcggccagggcgtacatgctaatcaacaggaggctggtgcccacctcggggggcggggggggctgcagctggaccaggggccgcagctgctcgacggcacccctggagatcacgtacagctcccggagcagctgctctatgttgtcggccatctgcatagtggggccgaggccgccccgggcggccggttcgaggagggtaatcagcgcgcccagtttggtgcgatggccctcgaccgtggggagatagcccagcccaaagtcccgggcccaggccaacacacgcagggcgaactcgaccgggcgtggaaggtaggccgcgctacacgtggccctcaacgcgtccccgaccaccagggccagaacgtaggggacgaagcccgggtcggcgaggacgttggggtgaatgccctcgagggcggggaagcggatctgggtcgccgcggccaggtggacagagggggcgtggctgggctgcccgacggggagaagcgcggacagcggcgtggccggggtggtgggggtgatgtcccagtgggtctgaccatacacgtcgatccagatgagcgccgtctcgcggagaaggctgggttgaccggaactaaagcggcgctcggccgtctcaaactcccccacgagcgcccgccgcaggctcgccagatgttccgtcggcacggccggacccatgatacgcgccagcgtctggctcagaacgccccccgacaggccgaccgcctcgcagagccgcccgtgcgtgtgctcgctggcgccctggacccgcctgaaagtttttacgtagttggcatagtacccgtattcccgcgccagaccaaacacgttcgaccccgcgagggcaatgcacccaaagagctgctggacttcgccgagtccgtggccggcgggcgtccgcgcggggacgcccgccgccagaaacccctccagggccgaaaggtagtgcgtgcagtgcgagggcgtgaacccagcgtcgatcagggtgttgatcaccacggagggcgaattggtattctggatcaacgtccacgtctgctgcagcagagccagcagccgctgctgggcgccggcggagggctgctccccgagctgcagcaggctggagacggcaggctggaagactgccagtgccgacgaactcaggaacggcacgtcgggatcaaacacggccacgtccgtccgcacgcgcgccattagcgtccccgggggcgcacaggccgagcgcgggctgacgcggctgagggccgtcgacacgcgcacctcctcgcggctgcgaaccatcttgttggcctccagtggcggaatcattatggccgggtcgatctcccgcacggtgtgctgaaactgcgccaacaggggcggcgggaccacagccccccgctcgggggtcgtcaggtactcgtccaccagggccaacgtaaagagggcccgtgtgaggggagtgagggtcgcgtcgtctatgcgctggaggtgcgccgagaacagcgtcacccgattactcaccagggccaagaaccggaggccctcttgcacgaacggggcggggaagagcaggctgtacgccggggtggtaaggttcgcgctgggctgccccaacgggaccggcgccatcttgagcgacgtctccccaagggcctcgatggaggtccgcgggctcatggccaagcagctcttggtgacggtttgccagcggtctatccactccacggcgcactggcggacgcggaccggccccagggccgccgcggtgcgcaggccggcggaatccagcgcatgggacgtgtcggagccggtgaccgcgaggatggtgtccttgatgacctccatctcccggaaggcctggtcgggggcctcggggagagccaccaccaagcggtgtacgagcaacccggggaggttctcggccaagagcgccgtctccggaagcccgtgggcccggtggagcgcgcacaggtgttccagcagcggccgccagcatgcccgcgcgtctgccggggcgatggccgttcccgacaacagaaacgccgccatggcggcgcgcagcttggccgtggccagaaacgccgggtcgtccgccccgtttgccgtctcggccgtgggggttggcggttggcgaaggccggctaggctcgccaataggcgctgcataggtccgtccgagggcggaccggcgggtgaggtcgtgacgacgggggcctcggacgggagaccgcggtctgccatgacgcccggctcgcgtgggtgggggacagcgtagaccaacgacgagaccgggcgggaatgactgtcgtgcgctgtagggagcggcgaattatcgatcccctgcggccctccaggaaccccgcaggcgttgcgagtaccccgcgtcttcgcggggtgttatacggccacttaagtcccggcatcccgttcgcggacccaggcccgggggattgtccggatgtgcgggcagcccggacggcgtgggttgcggactttctgcggggcggcccaaatggccctttaaacgtgtgtatacggacgcgccgggccagtcggccaacacaacccaccggaggcggtagccgcgtttggctgtggggtgggtggttccgccttgcgtgagtgtcctttcgacccccccctcccccgggtcttgctaggtcgcgatctgtggtcgcaatgaagaccaatccgctacccgcaaccccttccgtgtggggcgggagtaccgtggaactcccccccaccacacgcgataccgcggggcagggcctgcttcggtgcgtcctgcgccccccgatctctcgccgcgacggcccagtgctccccagggggtcgggaccccggagggcggccagcacgctgtggttgcttggcctggacggcacagacgcgccccctggggcgctgacccccaacgacgataccgaacaggccctggacaagatcctgcggggcaccatgcgcgggggggcggccctgatcggctccccgcgccatcatctaacccgccaagtgatcctgacggatctgtgccaacccaacgcggatcgtgccgggacgctgcttctggcgctgcggcaccccgccgacctgcctcacctggcccaccagcgcgccccgccaggccggcagaccgagcggctgggcgaggcctggggccagctgatggaggcgaccgccctggggtcggggcgagccgagagcgggtgcacgcgcgcgggcctcgtgtcgtttaacttcctggtggcggcgtgtgccgcctcgtacgacgcgcgcgacgccgccgatgcggtacgggcccacgtcacggccaactaccgcgggacgcgggtgggggcgcgcctggatcgtttttccgagtgtctgcgcgccatggttcacacgcacgtcttcccccacgaggtcatgcggtttttcggggggctggtgtcgtgggtcacccaggacgagctagcgagcgtcaccgccgtgtgcgccgggccccaggaggcggcgcacaccggccacccgggccggccccgctcggccgtgatcctcccggcgtgtgcgttcgtggacctggacgccgagctggggctggggggcccgggcgcggcgtttctgtacctggtattcacttaccgccagcgccgggaccaggagctgtgttgtgtgtacgtgatcaagagccagctccccccgcgcgggttggagccggccctggagcggctgtttgggcgcctccggatcaccaacacgattcacggcaccgaggacatgacgcccccggccccaaaccgaaaccccgacttccccctcgcgggcctggccgccaatccccaaaccccgcgttgctcggctggccaggtcacgaacccccagttcgccgacaggctgtaccgctggcagccggaccttcgggggcgccccaccgcacgcacctgtacgtacgccgcctttgcagagctcggcatgatgcccgaggatagtccccgctgcctgcaccgcaccgagcgctttggggcggtcagcgtccccgttgttattctggaaggcgtggtgtggcgccccggcgagtggcgggcatgcgcgtgagcgtagcaaacgccccgcccacacaacgctccgcccccaaccccttccccgctgtcactcgtggttcgttgacccggacgtccgccaaataaagccactgaaacccgaaacgcgagtgttgtaacgtcctttgggcgggaggaagccacaaaatgcaaatgggatacatggaaggaacacacccccgtgactcaggacatcggcgtgtccttttgggtttcactgaaactggcccgcgccccacccctgcgcgatgtggataaaaagccagcgcgggtggtttagggtaccacaggtgggtgctttggaaacttgtcggtcgccgtgctcctgtgagcttgcgtccctccccggtttcctttgcgctcccgccttccggacctgctctcgcctatcttctttggctgtcggtgcgattcgtcaggcagcggccttgtcgaatctcgaccccaccactcgccggacccgccgacgtcccctctggagcccgccgaaacccgccgcgtctgttgaaatggccagccgcccagccgcatcctctcccgtcgaagcgcgggccccggttgggggacaggaggccggcggccccagcgcagccacccagggggaggccgccggggcccctctcgcccacggccaccacgtgtactgccagcgagtcaatggcgtgatggtgctttccgacaagacgcccgggtccgcgtcctaccgcatcagcgatagcaactttgtccaatgtggttccaactgcaccatgattatcgacggagacgtggtgcgcgggcgcccccaggacccgggggccgcggcatcccccgctcccttcgttgcggtgacaaacatcggagccggcagcgacggcgggaccgccgtcgttgcattcgggggaaccccacgtcgctcggcggggacgtctaccggtacccagacggccgacgtcccagccgaggcccttgggggcccccctcctcctccccgcttcaccctgggtggcggctgttgctcctgtcgcgacacacggcgccgctctgcggtattcgggggggagggggatcccgtcggccccgcggagttcgtctcggacgaccggtcgtccgattccgactcggatgactcggaggacaccgactcggagacgctgtcacacgcctcctcggacgtgtccggcggggccacgtacgacgacgcccttgactccgattcgtcatcggatgactccctgcagatagatggccccgtgtgtcgcccgtggagcaatgacaccgcgcccctggatgtttgccccgggacccccggcccgggcgccgacgccggtggtccctcagcggtagacccacacgcgccgacgacaggggccggcgctggtcttgcggccgatcccgccgtggcccgggacgacgcggaggggctttcggacccccggccacgtctgggaacgggcacggcctaccccgtccccctggaactcacgcccgagaacgcggaggccgtggcgcgctttctgggagatgccgtgaaccgcgaacccgcgctcatgctggagtacttttgccggtgcgcccgcgaggaaaccaagcgtgtcccccccaggacattctgcagcccccctcgcctcacggaggacgactttgggcttctcaactacgcgctcgtggagatgcagcgcctgtgtctggacgttcctccggtcccgccgaacgcatacatgccctattatctcagggagtatgtgacgcggctggtcaacgggttcaagccgctggtgagccggtccgctcgcctttaccgcatcctgggggttctggtgcacctgcggatccggacccgggaggcctcctttgaggagtggctgcgatccaaggaagtggccctggactttggcctgacggaaaggcttcgcgagcacgaagcccagctggtgatcctggcccaggctctggaccattacgactgtctgatccacagcacaccgcacacgctggtcgagcgggggctgcaatcggccctgaagtatgaggagttttacctaaagcgctttggcgggcactacatggagtccgtcttccagatgtacacccgcatcgccggctttttggcctgccgggccacgcgcggcatgcgccacatcgccctggggcgagaggggtcgtggtgggaaatgttcaagttctttttccaccgcctctacgaccaccagatcgtaccgtcgacccccgccatgctgaacctggggacccgcaactactacacctccagctgctacctggtaaacccccaggccaccacaaacaaggcgaccctgcgggccatcaccagcaacgtcagtgccatcctcgcccgcaacgggggcatcgggctatgcgtgcaggcgtttaacgactccggccccgggaccgccagcgtcatgcccgccctcaaggtcctcgactcgctggtggcggcgcacaacaaagagagcgcgcgtccgaccggcgcgtgcgtgtacctggagccgtggcacaccgacgtgcgggccgtgctccggatgaagggggtcctcgccggcgaagaggcccagcgctgcgacaatatcttcagcgccctctggatgccagacctgtttttcaagcgcctgattcgccacctggacggcgagaagaacgtcacatggaccctgttcgaccgggacaccagcatgtcgctcgccgactttcacggggaggagttcgagaagctctaccagcacctcgaggtcatggggttcggcgagcagatacccatccaggagctggcctatggcattgtgcgcagtgcggccacgaccgggagccccttcgtcatgttcaaagacgcggtgaaccgccactacatctacgacacccagggggcggccatcgccggctccaacctctgcaccgagatcgtccatccggcctccaagcgatccagtggggtctgcaatctgggaagcgtgaatctggcccgatgcgtctccaggcagacgtttgactttgggcggctccgcgacgccgtgcaggcgtgcgtgctgatggtgaacatcatgatcgacagcacgctacaacccacgccccagtgcacccgcggcaacgacaacctgcggtccatgggaatcggcatgcagggcctgcacacggcctgcctgaagctggggctggatctggagtctgccgaatttcaggacctgaacaaacacatcgccgaggtgatgctgctgtcggcgatgaagaccagcaacgcgctgtgcgttcgcggggcccgtcccttcaaccactttaagcgcagcatgtatcgcgccggccgctttcactgggagcgctttccggacgcccggccgcggtacgagggcgagtgggagatgctacgccagagcatgatgaaacacggcctgcgcaacagccagtttgtcgcgctgatgcccaccgccgcctcggcgcagatctcggacgtcagcgagggctttgcccccctgttcaccaacctgtttagcaaggtgacccgggacggcgagacgctgcgccccaacacgctcctgctaaaggaactggaacgcacgtttagcgggaagcgcctcctggaggtgatggacagtctcgacgccaagcagtggtccgtggcgcaggcgctcccgtgcctggagcccacccaccccctccggcgattcaagaccgcgtttgactacgaccagaagttgctgatcgacctgtgtgcggaccgcgccccctacgtcgaccatagccaatccatgaccctgtatgtcacggagaaggcggacgggaccctcccagcctccaccctggtccgccttctggtccacgcatataagcgcggactaaaaacagggatgtactactgcaaggttcgcaaggcgaccaacagcggggtctttggcggcgacgacaacattgtctgcacgagctgcgcgctgtgaccgacaaaccccctccgcgccaggcccgccgccactgtcgtcgccgtcccacgcgctcccccgctgccatggattccgcggccccagccctctcccccgctctgacggcccatacgggccagagcgcgccggcggacctggcgatccagattccaaagtgccccgaccccgagaggtacttctacacctcccagtgtcccgacattaaccacctgcgctccctcagcatccttaaccgctggctggaaaccgagcttgttttcgtgggggacgaggaggacgtctccaagctttccgagggcgagctcagcttttaccgcttcctcttcgctttcctgtcggccgccgacgacctggttacggaaaacctgggcggcctctccggcctgtttgagcagaaggacattctccactactacgtggagcaggaatgcatcgaagtcgtacactcgcgcgtgtacaacatcatccagctggtgctttttcacaacaacgaccaggcgcgccgcgagtacgtggccggcaccatcaaccacccggccatccgcgccaaggtggactggttggaagcgcgggtgcgggaatgcgcctccgttccggaaaagttcattctcatgatcctcatcgagggcatcttttttgccgcctcgtttgccgccatcgcctaccttcgcaccaacaaccttctgcgggtcacctgccagtcaaacgacctcatcagccgggacgaggccgtgcacacgacggcctcgtgttacatctacaacaactacctcggcgggcacgccaagcccccgcccgaccgcgtgtacgggctgttccgccaggcggtcgagatcgagatcggatttatccgatcccaggcgccgacggacagccatatcctgagcccggcggcgctggcggccatcgaaaactacgtgcgattcagcgcggatcgcctgttgggccttatccacatgaagccactgttttccgccccaccccccgacgccagctttccgctgagcctcatgtccaccgacaaacacaccaattttttcgagtgtcgcagcacctcctacgccggggcggtcgtcaacgatctgtgagggtcgcggcgcgcttctacccgtgtttgcccataataaacctctgaaccaaactttgggtctcattgtgattcttgtcagggacgcgggggtgggagaggataaaaggcggcgcaaaaagcagtaaccaggtccggccagattctgagggcataggataccataattttattggtgggtcgtttgttcggggacaagcgcgctcgtctgacgtttgggctactcgtcccagaatttggccaggacgtccttgtagaacgcgggtgggggggcctgggtccgcagctgctccagaaacctgtcggcgatatcaggggccgtgatatgccgggtcacgatagatcgcgccaggttttcgtcgcggatgtcctggtagataggcaggcgtttcagaagagtccacggcccccgctccttggggccgataagcgatatgacgtacttaatgtagcggtgttccaccagctcggtgatggtcatgggatcggggagccagtccagggactctggggcgtcgtggatgacgtggcgtcgccggctggccacataactgcggtgctcttccagcagctgcgcgttcgggacctggacgagctcgggcggggtgagtatctccgaggaggacgacctggggccggggtggcccccggtaacgtcccggggatccagggggaggtcctcgtcgtcttcgtatccgccggcgatctgttgggttagaatttcggtccacgagacgcgcgtctcggtgccgccggtggccggcggcagagggggcctggtttccgtggagcgcgagctggtgtgttcccggcggatggcccgccgggtctgagagcgactcgggggggtccagtgacattcgcgcagcacatcctccacggaggcgtaggtgttattgggatggaggtcggtgtggcagcggacaaagagggccaggaactgggggtagctcatcttaaagtacttcagtatatcgcgacagttgatcgtgggaatgtagcaggcgctaatatccaacacaatatcgcagcccatcaacaggaggtcagtgtccgtggtgtacacgtacgcgaccgtgttggtgtgatagaggttggcgcaggcatcgtccgcctccagctgacccgagttaatgtaggcgtaccccagggcccggagaacgcgaatacagaacagatgcgccagacgcagggccggcttcgagggcgcggcggacggcagcgcggctccggacccggccgtcccccgggtccccgaggccagagaggtgccgcgtcggcgcatgttggaaaaggcagagctgggtctggagtcggtgatgggggaaggcggtggagaggcgtccacgtcactggcctcctcgtccgtccggcactgggccgtcgtgcgggccaggatggccttggctccaaacacaaccggctccatacaattgaccccgcgatcggtaacgaagatggggaaaagggacttttgggtaaacacctttaataagcgacagaggcagtgtagcgtaatggcctcgcggtcgtaactggggtatcggcgctgatatttgaccaccaacgtgtacatgacgttccacaggtccacggcaatgggggtgaagtacccggccggggccccaaggccccggcgcttgaccagatggtgtgtgtgggcaaacttcatcatcccgaacaaacccatgtcaggtcgattgtaactgcggatcggcctaactaaggcgtggttggtgcgacggtccgggacacccgagcctgtctctctgtgtatggtgacccagacaacaacaccgacacaagaggacaataatccgttaggggacgctctttataatttcgatggcccaactccacgcggattggtgcagcaccctgcatgcgccggtgcgggccaaccttccccccgctcattgcctcttccaaaagggtgtggcctaacgagctgggggcgtatttaatcaggctagcgcggcgggcctgccgtagtttctggctcggtgagcgacggtccggttgcttgggtcccctggctgccatcaaaaccccaccctcgcagcggcatacgccccctccgcgtcccgcacccgagaccccggcccggctgccctcaccaccgaagcccacctcgtcactgtggggtgttcccagcccgcgttgggatgacggattcccctggcggtgtggcccccgcctcccacgtggaggacgcgtcggacgcgtccctcgggcagccggaggagggggcgccctgccaggtggtcctgcagggcgccgagcttaatggaatcctacaggcgtttgccccgctgcgcacgagccttctggactcgcttctggttatgggagaccggggcatccttatccataacacgatctttggggagcaggtgttcctgcccctggaacactcgcaattcagtcggtatcgctggcgcggacccacggcggcgttcctgtctctcgtggaccagaagcgctccctcctgagcgtgtttcgcgccaaccagtacccggacctacgtcgggtggagttggcgatcacgggccaggccccgtttcgcacgctggttcagcgcatatggacgacgacgtccgacggcgaggccgttgagctagccagcgagacgctgatgaagcgcgaactgacgagctttgtggtgctggttccccagggaacccccgacgttcagttgcgcctgacgaggccgcagctcaccaaggtccttaacgcgaccggggccgatagtgccacgcccaccacgttcgagctcggggttaacggcaaattttccgtgttcaccacgagtacctgcgtcacatttgctgcccgcgaggagggcgtgtcgtccagcaccagcacccaggtccagatcctgtccaacgcgctcaccaaggcgggccaggcggccgccaacgccaagacggtgtacggggaaaatacccatcgtaccttctctgtggtcgtcgacgattgcagcatgcgggcggtgctccggcgactgcaggtcgccgggggcaccctcaagttcttcctcacgacccccgtccccagtctgtgcgtcaccgccaccggtcccaacgcggtatcggcggtatttctcctgaaaccccagaagatttgcctggactggctgggtcatagccaggggtctccttccgccgggagctcggcctcccgggcctctgggagcgagccaacagacagccaggactccgcgtcggacgcggtcagccacggcgatccggaagacctcgatggcgctgcccgggcgggagaggcgggggcctcgtacgcctgtccgatgccgtcgtcgaccacgcgggtcactcccacgaccaagcgggggcgctcggggggcgaggatgcgcacgcggacacggccctaaagaaacctaagacggggtcgcccaccgcacccccgcccgcagatccagtccccctggacacggaggacgactccgatgcggcggacgggacggcggcccgtcccgccgctccagacgcccgaagcggaagccgttacgcgtgttactttcgcgacctcccgaccggagaagcaagccccggcgccttctccgccttccgggggggcccccaaaccccgtctggttttggattcccctgacggggcggggccttagcggccgcccaaccctcgcaacatcccggggttaatgtaaataaacttggtattgcccaacactctcccgcgtgtcgcgtgtggttcatgtgtgtgcctggcgcccccaccctcgggttcgtgtatttcctttccctgtccttataaaagccgtatgtggggcgctgacggaaccaccccgcgtgccatcacggccaaggcgcgggatgctccgcaacgacagccaccgggccgcgtccccggaggacggccagggacgggtcgacgacggacggccacacctcgcgtgcgtgggggccctggcgcgggggttcatgcatatctggcttcaggccgccacgctgggttttgcgggatcggtcgttatgtcgcgcgggccgtacgcgaatgccgcgtctggggcgttcgccgtcgggtgcgccgtgctgggctttatgcgcgcgccccctcccctcgcgcggcccaccgcgcggatatacgcctggctcaaactggcggccggtggagcggcccttgttctgtggagtctcggggagcccggcacgcagccgggggccctggccccgggcccggccacccagtgcctggcgctgggcgccgcctatgcggcgctcctggtgctcgccgatgacgtctatccgctctttctcctcgccccggggcccctgttcgtcggcaccctggggatggtcgtcggcgggctgacgatcggaggcagcgcgcgctactggtggatcggtgggcccgccgcggccgccctggccgcggcggtgttggcgggcccgggggcgaccaccgccagggactgcttctccagggcgtgccccgaccaccgccgcgtctgcgtcatcgtcgcaggcgagtctgtttcccgccgccccccggaggacccagagcgacccggggacccagggccaccgtcccccccgacaccccaacgatcccaggggccgccggccgatgaggtcgcaccggccggggtagcgcggcccgaaaacgtctgggtgcccgtggtcacctttctgggggctggcgcgctcgccgtcaagacggtgcgagaacatgcccggggaacgccgggcccgggcctgccgctgtggccccaggtgtttctcggaggccatgtggcggtggccctgacggagctgtgtcaggcgcttgcgccctgggaccttacggacccgctgctgtttgttcacgccggactgcaggtcatcaacctcgggttggtgtttcggttttccgaggttgtcgtgtatgcggcgctagggggtgccgtgtggatttcgttggcgcaggtgctggggctccggcgtcgcctgcacaggaaggaccccggggacggggcccggttggcggcgacgcttcggggcctcttcttctccgtgtacgcgctggggtttggggtgggggcgctgctgtgccctccggggtcaacgggcgggcggtcgggcgattgatatatttttcaataaaaggcattagtcccgaagaccgccggtgtgtgatgatttcgccataacacccaaaccccggatggggcccgggtataaattccggaaggggacacgggctaccttcactaccgagggcgcttggtcgggaggccgcatcgaacgcacacccccatccggtggtccgtgtggaggtcgtttttcagtgcccggtctcgctttgccgggaacgctagccgatccctcgcgagggggaggcgtcgggcatggccccggggcgggtgggccttgccgtggtcctgtggagcctggtgtggctcggggcgggggtgtccgggggctcggaaactgcctccaccgggcccacgatcaccgcgggagcggtgacgaacgcgagcgaggcccccacatcggggtcccccgggtcagccgccagcccggaggtcacccccacatcgaccccaaaccccaacaatgtcacacaaaaccaaaccacccccaccgagccggccagccccccaacaacccccaagcccacctccacacccaaaagcccccccacgtccacccccgaccccaaacccaagaacaacaccacccccgccaagtcggaccgccccactaaaccccccgggcccgtgtggtgcgaccgccgcgatttattggcccggtacggctcgcgggtgcagatccgatgccggtttcggaattccacccgcatggagttccgcctccagatatggcgttactccatgggtccgtcccccccaatcgctccggctcccgacctagaggaggtcctgacgaacatcaccgccccacccgggggactcctggtgtacgacagcgcccccaacctaacggacccccacgtgctctgggcggagggggccggcccgggcgccgaccctccgttgtattctgtcaccgggccgctgccgacccagcggctgattatcggcgaggtgacgcccgcgacccagggaatgtattacttggcctggggccggatggacagcccgcacgagtacgggacgtgggtgcgcgtccgcatgttccgccccccgtctctgaccctccagccccacgcggtgatggagggtcagccgttcaaggcgacgtgcacggccgccgcctactacccgcgtaaccccgtggagtttgtctggttcgaggacgaccaccaggtgtttaacccgggccagatcgacacgcagacgcacgagcaccccgacgggttcaccacagtctctaccgtgacctccgaggctgtcggcggccaggtccccccgcggaccttcacctgccagatgacgtggcaccgcgactccgtgacgttctcgcgacgcaatgccaccgggctggccctggtgctgccgcggccaaccatcaccatggaatttggggtccggcatgtggtctgcacggccggctgcgtccccgagggcgtgacgtttgcctggttcctgggggacgacccctcaccggcggctaagtcggccgttacggcccaggagtcgtgcgaccgccccgggctggctacggtccggtccaccctgcccatttcgtacgactacagcgagtacatctgtcggttgaccggatatccggccgggattcccgttctagagcaccacggcagtcaccagcccccacccagggaccccaccgagcggcaggtgatcgaggcgatcgagtgggtggggattggaatcggggttctcgcggcgggggtcctggtcgtaacggcaatcgtgtacgtcgtccgcacatcacagtcgcggcagcgtcatcggcggtaacgcgagacccccccgttacctttttaatatctatatagtttggtccccctctatcccgcccaccgctgggcgctataaagccgccaccctctcttccctcaggtcatccttggtcgatcccgaacgacacacggcgtggagcaaaacgcctccccctgagccgctttcctaccagcgcaacggcatgcctctgcgggcatcggaacacgcctaccggcccctgggccccgggacaccccccatgcgggctcggctccccgccgcggcctgggttggcgtcgggaccatcatcgggggagttgtgatcattgccgcgttggtcctcgtgccctcgcgggcctcgtgggcactttccccatgcgacagcggatggcacgagttcaacctcgggtgcatatcctgggatccgacccccatggagcacgagcaggcggtcggcggctgtagcgccccggcgaccctgatcccccgcgcggctgccaaacagctggccgccgtcgcacgcgtccagtcggcaagatcctcgggctactggtgggtgagcggagacggcattcgggcctgcctgcggctcgtcgacggcgtcggcggtattgaccagttttgcgaggagcccgcccttcgcatatgctactatccccgcagtcccgggggctttgttcagtttgtaacttcgacccgcaacgcgctggggctgccgtgaggcgcgtgtactgcggtctgtctcgtctcctcttctccccttccctccccctccgcatcccaggatcacaccggccaacgagggttggggggtccggcacggacccaaaataataaacacacaatcacgtgcgataaaaagaacacgcggtcccctgtggtgtttttggttatttttattaaatctcgtcgtcaaacagggggaaaggggcgtggtctagcgacggcagcacgggtggaggcgttcaccggctccggcgtccttcgcgtttaagcttggtcaggagggcgctcagggcggcgacgttggtcgggccgtcgttggtcagggcgttggctcgatggcgggcgaggacgggcgaggggctcaacggcgggggcgggggcccggtgcggcccgggggggaaaatagggcggatcccccccagtcgtacaggggattttccgcctcaatgtacggggaggccggcgctgcattcgccgtgttcgcgcagacgttttcgtagacccgcatccatggtatttcctcgtagacacgccccccgtcctcgctcacagtctcgtatattgactcgtcgtcctcgtagggggcgtgccgttcgcgggccgaggcggcgtgggtggctttgcggcgggcgtcgtcgtcgtcgtcggccgtcagatacgtggcttccatctggtcgggttctccctccggggcgggtccccacccccgtggccgatcgaggctccccagagacgcgcgccggacgaggagggggcacgtcgccgccggcggtcgcctgtcgggtcccgcgacgttacgggccgggaggcgcgggggcacctcccccatgtgcgtgtaatacgtggccggctgtgcggccgcagcggggggctcggcgaccgggtcgtccgcatccggaagcgggggcgccgcgccgtccgcgcggcgcctccggaaccgccgggtggccgcgggggtcgagtgtaggcgaggtcgggggaggggcgggggctcgttgtcgcgccgcgcccgctgaatcttttcccgacaggtcccaccccccgcgcgatgcccccccgggccgcgggccatgtcgtccgggggaggccccgcggaccacgtcgtccggcgagacgccacgagccgcaggatggactcgtagtggagcgacggcgccccgctgcggagcagatccgcggccagggcggccccgaaccaagccttgatgctcaactccatccgggcccagctgggggcggtcatcgtggggaacaggggggcggtggtccgacagaaacgctcctggctgtccaccgcggcccgcagatactcgttgttcaggctgtcggtggcccagacgccgtacccggtgagggtcgcgttgatgatatactgggcgtggtgatggacgatcgacagaacctccaccgtggatacgacggtatccacggtcccgtacgtaccgccgctccgcttgccggtctgccacaggttggctaggcgcgtcaggtggcccaggacgtcgctgaccgccgccctgagcgccatgcactgcatggagccggtcgtgccgctgggaccccggtccagatggcgcgcgaacgtttccgcgggcgcctccgggctgccgccgagcgggaggaaccggcgattggagggactcagccggtggcatacgtgcttgtctgtcgtccacagcatccaggacgcccaccggtacagcacggagacgtaggccaggagctcgttgagccgcagtgcggtgtcggtgctggggcggcttgggtccgccgggcgcataaagaacatgtactgctgaatccgatggagggcgtcgcgcaggccggccacggtggcggcgtacttggccgccgcggccccgctcttgaacggggtgcgcgccagcagctttggcgccagggtgggccgcagcagcacgtgaaggctggggtcgcagtcgcccacggggtcctcggggacgtccaggccgctgggcaccaccgtctgcaggtacttccagtactgcgtgaggatggcgcggctcaactggccgccggtgagctccacctcgcccagcgcctgggtggcggccgaagcgtagtgccggatgtactcgtagtgcgggtcgctggcgagcccgtccacgatcaaactctcgggaaccgtgttgtgttgccgcgcggccaaccggacgctgcgatcggtgcaggtcagaaacgccggctgcgcgtcgtcggagcgctgccgcaaggcgcccacggccgcgctaaggagcccctccggggtggggagcagacacccgccgaagatgcgccgctcgggaacgcccgcgttgtcgccgcggatcaggttggcaggcgtcaggcaccgcgccagccgcagggagctcgcgccgcgcgtccggcgctgcatggtgacgcccgttcggtcgggacccgccggtcggagttatgccgcgtccagggccatcggggcgctttttatcgggaggagcttatgggcgtggcgggcctcccagcccggtcgcgcgcctccccgacacgtgcgcccgcagggcggcggccccctcgtctcccatcagcagtttcctaaactgggacatgatgtccaccacgcggacccgcgggcccaacacggacccgccgcttacgggggcgggggggaagggctccaggtccttgagaagaaaggcggggtctgccgtcccggacacgggggcccggggcgctgaggaggcggggcgcagatccacgtgctccgcggccgcgcggacgtccgcccagaacttggcgggggtggtgcgcgcgtacaggggctgggtcgctcggaggacgcacgcgtagcgcaggggggtgtacgtgcccacctcgggggccgtgaatcccccgtcaaacgcggccagtgtcacgcacgccaccacggtgtcggcaaagcccagcagccgctgcaggacgagcccggcggccagaatggcgcgcgtggccgccgcgtcgtcccggcgccggtgcgcgtccccgcacgcccgggcgtactttaaggtcacggtcgccagggccgtgtgcagcgcgtacaccgcagcgcccagcacggcgttgagcccgctgttggcgagcagccggcgcgctgcggtgtcgcccagcgcctcgtgctcggcccccacgaccgcggggcttcccaggggcagggcgcgaaacagctcctcccgcgccacgtccgcaaaggcggggtggtgcacgtgcgggtgcaggcgcgcccccacgaccaccgagagccactggaccgtctgctccgccatcaccgccagcacatccagcacgcgccccaggaaggcggcctcccgcgtcaaaacgcaccggacggcgtcgggattgaagcgggcgagcagggccccggtggccaggtacgtcatgcggccggcatagcgggcggccacgcgacagtcgcggtccagcagcgcgcgcaccccgggccagtacagcagggaccccagcgagctgcgaaacaccgcggcgtcggggccggattggggggacactaacccccccgcgctcagtaacggcacggccgcggccccgacgggacgcaacgccgtgaggctcgcgaactgccgcctcagctcggcagccctgtcgtccaggtccgacccgcgcgcctctgcgtgaaggcgcgtcccgcacacccacccgttgatggccagccgcacgacggcatccgccaaaaagctcatcgcctgggcggggctggtttttgttcgacgatccgtcaggtcaagaatcccatcgcccgtgatataccaggccaacgcctcgccctgctgcagggtttggcggaaaaacaccgcggggttgtcgggggaggcgaagtgcatgacccccacgcgcgataacccgaacgcgctatccggacacgggtaaaacccggccggatgccccagggctagggcggagcgcacggactcgtcccacacggcaacctgaggggccagtcgatccaacgggaatgccgcccggagctccgggcccggcacgcgtccctccagaacctccaccttgggcggggaacgggccccgccgccgtcctccggcccgacgtcttccgggtagtcgtcctcctcgtactgcagctcctctaggaacagcggcgacggcgccacccgcgaaccgccgacccgccccaaaatagcccgcgcgtcgacgggacccaggtatcccccctgccgggcctgcggaggaccgcggggaacctcatcatcatcgtccaggcgaccgcgcaccgactggctacgggccgcatcgggcccggggcgctgccgggacgctcggcgatgggatgtgggcggggcttccgacgcgcgccgtcgtcgggctcgcgggccttcccgtcgacggcgcacgggcggctcgtcgcccgccatctcctccagagcctctagctcgctgtcgtcatccccgcggaacaccgcacgcaggtaccccatgaaccccaccccatcgcccgctggctcgtccgccacgggcgaggcgcgggggcgggtggatgcgcgcctcctacgccccgcgggttcgcgagccgacatggtggcgatagacgcgggttatcggatgtccgctaccccccaaaaaagaaaaagaccccacagcgcggatggaggccggggtaggtgccgccggaccccctcgcgatgggaatggacgggagcgacggggccggcgcaaaaaacgcagtatctcccgcgaaggctacccgccgccccagcccccggccaaatgcggaaacggtcccgcgctctcgcctttatacgcgggccgccctgcgacacaatcacccgtccgtggtttcgaatctacacgacaggcccgcagacgcggctaacacacacgccggcaacccagaccccagtgggttggttgcgcggtcccgtctcctggctagttcttttccccaccaccaaataatcagacgacaaccgcaggtttttgtaatgtatgtgctcgtgtttattgtggatacgaaccggggacgggaggggaaaacccagacgggggatgcgggtccggtcgcgccccctacccaccgtactcgtcaattccaagggcatcggtaaacatctgctcaaactcgaagtcggccatatccagagcgccgtagggggcggagtcgtggggggtaaatcccggacccggggaatccccgtcccccaacatgtccagatcgaaatcgtctagcgcgtcggcatgcgccatcgccacgtcctcgccgtctaagtggagctcgtcccccaggctgacatcggtcgggggggccgtcgacagtctgcgcgtgtgtcccgcggggagaaaggacaggcgcggagccgccagccccgcctcttcgggggcgtcgtcgtccgggagatcgagcaggccctcgatggtagacccgtaattgtttttcgtacgcgcgcggctgtacgcgtgttcccgcatgaccgcctcggagggcgaggtcgtgaagctggaatacgagtccaacttcgcccgaatcaacaccataaagtacccagaggcgcgggcctggttgccatgcagggtgggaggggtcgtcaacggcgcccctggctcctccgtagccgcgctgcgcaccagcgggaggttaaggtgctcgcgaatgtggtttagctcccgcagccggcgggcctcgattggcactccccggacggtgagcgctccgttgacgaacatgaagggctggaacagacccgccaactgacgccagctctccaggtcgcaacagaggcagtcaaacaggtcgggccgcatcatctgctcggcgtacgcggcccataggatctcgcgggtcaaaaatagatacaaatgcaaaaacagaacacgcgccagacgagcggtctctcggtagtacctgtccgtgatcgtggcgcgcagcatttctcccaggtcgcgatcgcgtccgcgcatgtgcgcctggcggtgcagctgccggacgctggcgcgcaggtaccggtacagggccgagcagaagttggccaacacggttcgatagctctcctcccgcgcccgtagctcggcgtggaagaaacgagagagcgcttcgtagtagagcccgaggccgtcgcgggtggccggaagcgtcgggaaggccacgtcgccgtgggcgcgaatgtcgatttgggcgcgttcggggacgtacgcgtccccccattccaccacatcgctgggcagcgttgataggaatttacactcccggtacaggtcggcgttggtcggtaacgccgaaaacaaatcctcgttccaggtatcgagcatggtacatagcgcggggcccgcgctaaagcccaagtcgtcgaggagacggttaaagagggcggcgggggggacgggcatgggcggggagggcatgagctgggcctggctcaggcgccccgttgcgtacagcggaggggccgccggggtgtttttgggacccccggccgggcgggggggtggtggcgaagcgccgtccgcgtccatgtcggcaaacagctcgtcgaccaagaggtccattgggtggggttgatacgggaaagacgatatcgggcttttgatgcgatcgtccccgcccgcccagagagtgtgggacgcccgacggcgcgggaagagaaaaacccccaaacgcgttagaggaccggacggaccttatggggggaagtgggcagcgggaaccccgtccgttcccgaggaatgacagcccgtggtcgccaccccgcatttaagcaacccgcacgggccgccccgtacctcgtgacttccccccacattggctcctgtcacgtgaaggcgaaccgagggcggctgtccaacccaccccccgccacccagtcacggtccccgtcggattgggaaacaaaggcacgcaacgccaacaccgaatgaacccctgttggtgctttattgtctgggtacggaagtttttcactcgacgggccgtctggggcgagaagcggagcgggctggggctcgaggtcgctcggtggggcgcgacgccgcagaacgccctcgagtcgccgtggccgcgtcgacgtcctgcaccacgtctggattcaccaactcgttggcgcgctgaagcaggtttttgccctcgcagaccgtcacgcggatggtggtgatgccaaggagttcgttgaggtcttcgtctgtgcgcggacgcgacatgtcccagagctggaccgccgccatccgggcatgcatggccgccaggcgcccgaccgcggcgcagaagacgcgcttgttaaagccggccacccggggggtccatggcgcgtcggggtttgggggggcggtgctaaagtgcagctttctggccagcccctgcgcgggtgtcttggatcgggttggcgccgtcgacgcgggggcgtctgggagtgcggcggattctggctgggccgatttcctgccgcgggtggtctccgccgccggggccgcgggggccttagtcgccacccgctgggttcggggggcccggggggcggtggtgggtgtgcgtccggcccctccggacccagcgggcggcggaggcgcccgcgcaggccccgggccggacaaaaccgccccggaaacgggacgccgcgtccgggggacctccgggtgttcgtcgtcttcggatgacgagcccccgtagagggcataatccgactcgtcgtactggacgaaacggacctcgcccctcgggcgcgcgcgtgtctgtagggcgccacggcgggaggtggcaggcggactatcgggactcgccatacatgaagacggggtgtagtacagatcctcgtactcatcgcgcggaacctcccgcggacccgacttcacggagcggcgagaggtcatggttccacgaacacgctagggtcggatgcgcggacaattaggcctgggttcggacggcggggggtggtgcaggtgtggagaggtcgagcgataggggcggcccgggagagaagagagggtccgcaaaacccactggggatgcgtgagtggccctctgtgggcggtgggggagagtcttataggaagtgcatataaccacaacccatgggtctaaccaatccccaggggccaagaaacagacacgccccaaacggtctcggtttccgcgaagaaggggaagtcctgggacaccctccacccccacccctcaccccacacagggcgggttcaggcgtgcccggcagccagtagcctctggcagatctgacagacgtgtgcgataatacacacgcccatcgaggccatgcctacataaaagggcaccagggcccccggggcagacatttggccagcgttttgggtctcgcaccgcgcgcccccgatcccatcgcgcccgccctcctcgccgggcggctccccgtgcgggcccgcgtctcccgccgctaaggcgacgagcaagacaaacaacaggcccgcccgacagacccttctgggggggcccatcgtccctaacaggaagatgagtcagtggggatccggggcgatccttgtccagccggacagcttgggtcgggggtacgatggcgactggcacacggccgtcgctactcgcgggggcggagtcgtgcaactgaacctggtcaacaggcgcgcggtggcttttatgccgaaggtcagcggggactccggatgggccgtcgggcgcgtctctctggacctgcgaatggctatgccggctgacttttgtgcgattattcacgcccccgcgctatccagcccagggcaccacgtaatactgggtcttatcgactcggggtaccgcggaaccgttatggccgtggtcgtagcgcctaaaaggacgcgggaatttgcccccgggaccctgcgggtcgacgtgacgttcctggacatcctggcgccccccccggccctcaccaagccgatttccctgcggcagttcccgcaactggcgcccccccctccaaccggggccgggatacgcgcagatccttggttggagggggcgctcggggacccaagcgtgactccggccctaccggcgcgacgccgagggcggtccctcgtctatgccggcgagctgacgccggttcagacggaacacggggacggcgtacgagaagccatcgccttccttccaaaacgcgaggaggatgccggtttcgacattgtcgtccgtcgcccggtcaccgtcccggcaaacggcaccacggtcgtgcagccatccctccgcatgctccacgcggacgccgggcccgcggcctgttatgtgttggggcggtcgtcgctcaacgcccgcggcctcctggtcgttcctacgcgctggctccccgggcacgtatgtgcgtttgttgtttacaaccttacgggggttcctgtgaccctcgaggccggcgccaaggtcgcccagctcctggttgcgggggcggacgctcttccttggatccccccggacaactttcacgggaccaaagcgcttcgaaactaccccaggggtgttccggactcaaccgccgaacccaggaacccgccgctcttggtgtttacgaacgagtttgacgcggaggcccccccgagcgagcgcgggaccgggggttttggctctaccggtatttagcccatagcttggggttcgttccgggcaataaaaaacgtttgtatctcatctttcctgtgtgtagttgtttctgttggaggcctgtgggtctatcacacccgcccctccatcccacaaacacagaacacacgggttggatgaaaacacgcatttattgacccaaaacacacggagctgctcgagatgggccagggcgaggtgcggttggggaggctgtaggtctgggaacggacacgcggggacacgattccggtttggggtccgggagggcgtcgccgtttcgggcggcaggcgccagcgtaacctccgggggcggcgtgtgggggtgccccaaggagggcgcctcggtcaccccaagcccccccaagcgggttcccccggcaaccccgaaggcggagaggccaagggcccgttcggcgatggccacatcctccatgaccacgtcgctctcggccatgctccgaatagcctgggagacgagcacatccgcggacttgtcagccgcccccacggacatgtacatctgcaggatggtggccatacacgtgtccgccaggcgccgcatcttgtcctgatgggccgccacggccccgtcgatcgtgggggcctcgagcccggggtggtggcgcgccagtcgttctaggttcaccatgcaggcgtggtacgtgcgggccaaggcgcgggccttcacgaggcgtcgggtgtcgtccagggaccccagggcgtcatcgagcgtgatgggggcgggaagtagcgcgttaacgaccaccagggcctcctgcagccgcggctccgcctccgagggcggaacggccgcgcggatcatctcatattgttcctcggggcgcgctccccagccacatatagccccgagaagagaagccatcgcgggcgggtactggcccttgggcgcgcggacgcaatggggcaggaagacgggaaccgcggggagaggcgggcggccgggactcccgtggaggtgaccgcgctttatgctaccgacgggtgcgttattacctcttcgatcgccctcctcacaaactctctactgggggccgagccggtttatatattcagctacgacgcatacacgcacgatggccgtgccgacgggcccacggagcaagacaggttcgaagagagtcgggcgctctaccaagcgtcgggcgggctaaatggcgactccttccgagtaaccttttgtttattggggacggaagtgggtgggacccaccaggcccgcgggcgaacccgacccatgttcgtctgtcgcttcgagcgagcggacgacgtcgccgcgctacaggacgccctggcgcacgggaccccgctacaaccggaccacatcgccgccaccctggacgcggaggccacgttcgcgctgcatgcgaacatgatcctggctctcaccgtggccatcaacaacgccagcccccgcaccggacgcgacgccgccgcggcgcagtatgatcagggcgcgtccctacgctcgctcgtggggcgcacgtccctgggacaacgcggccttaccacgctatacgtccaccacgaggcgcgcgtgctggccgcgtaccgcagggcgtattatggaagcgcgcagagtcccttctggtttcttagcaaattcgggccggacgaaaaaagcctggtgctcaccactcggtactacctgcttcaggcccagcgtctggggggcgcgggggccacgtacgacctgcaggccatcaaggacatctgcgccacctacgcgattccccacgccccccgccccgacaccgtcagcgccgcgtccctgacctcgtttgccgccatcacgcggttctgttgcacgagccagtacgcccgcggggccgcggcggccgggtttccgctttacgtggagcgccgtattgcggccgacgtccgcgagaccagtgcgctggagaagttcataacccacgatcgcagttgcctgcgcgtgtccgaccgtgaattcattacgtacatttacctggcccattttgagtgtttcagccccccgcgcctagccacgcatcttcgggccgtgacgacccacgaccccaaccccgcggccaacacggagcagccctcgcccctgggcagggaggccgtggaacaatttttttgccacgtgcgcgcccaactgaatatcggggagtacgtcaaacacaacgtgaccccccgggagaccgtcctggatggcgatacggccaaggcctacctgcgcgctcgcacgtacgcgcccggggccctgacgcccgcccccgcgtattgcggggccgtggactccgccaccaaaatgatggggcgtttggcggacgccgaaaagctcctggtcccccgcgggtggcccgcgtttgcgcccgccagtcccggggaggatacggcgggcggcacgccgcccccacagacctgcggaatcgtcaagcgcctcctgagactggccgccacggaacaacaggacaccacgcccccggcgatcgcggcgcttatccgtaatgcggcggtgcagactcccctgcccgtctaccggatatccatggtccccacgggacaggcatttgccgcgctggcctgggacgactgggcccgcataacgcgggacgctcgcctggccgaagcggtcgtgtccgccgaagcggcggcgcaccccgaccacggcgcgctgggcaggcggctcacggatcgcatccgcgcccagggccccgtgatgccccctggcggcctggatgccggggggcagatgtacgtgaatcgcaacgagatattcaacggcgcgctggcaatcacaaacatcatcctggatctcgacatcgccctgaaggagcccgtcccctttcgccggctccacgaggccctgggccactttaggcgcggggctctggctgcggttcagctcctgtttcccgcggcccgcgtggaccccgacgcatatccctgttattttttcaaaagcgcatgtcggcccggcccggcgtccgtgggttccggcagcggactcggcgacgacggggactggtttccctgctacgacgacgccggtgatgaggagtgggcggaggacccgggcgccatggacacatcccacgatcccccggacgacgaggttgcctactttgacctgtgccacgaagtcggccccacggcggaacctcgcgaaacggattcgcccgtgtgttcctgcaccgacaagatcggactgcgggtgtgcatgcccgtccccgccccgtacgtcgtccacggttctctaacgatgcggggggtggcacgggtcatccagcaggcggtgctgttggaccgagattttgtggaggccatcgggagctacgtaaaaaacttcctgttgatcgatacgggggtgtacgcccacggccacagcctgcgcttgccgtattttgccaaaatcgcccccgacgggcctgcgtgcggaaggctgctgccagtgtttgtgatcccccccgcctgcaaagacgttccggcgtttgtcgccgcgcacgccgacccgcggcgcttccattttcacgccccgcccacctatctcgcttccccccgggagatccgtgtcctgcacagcctgggtggggactatgtgagcttctttgaaaggaaggcgtcccgcaacgcgctggaacactttgggcgacgcgagaccctgacggaggtcctgggtcggtacaacgtacagccggatgcgggggggaccgtcgaggggttcgcatcggaactgctggggcggatagtcgcgtgcatcgaaacccactttcccgaacacgccggcgaatatcaggccgtatccgtccggcgggccgtcagtaaggacgactgggtcctcctacagctagtccccgttcgcggtaccctgcagcaaagcctgtcgtgtctgcgctttaagcacggccgggcgagtcgcgccacggcgcggacattcgtcgcgctgagcgtcggggccaacaaccgcctgtgcgtgtccttgtgtcagcagtgctttgccgccaaatgcgacagcaaccgcctgcacacgctgtttaccattgacgccggtacgccatgctcgccgtccgttccctgcagcacctctcaaccgtcgtcttgataacggcgtacggcctcgtgctcgtgtggtacaccgtcttcggtgccagtccgctgcaccgatgtatttacgcggtacgccccaccggcaccaacaacgacaccgccctcgtgtggatgaaaatgaaccagaccctattgtttctgggggccccgacgcacccccccaacgggggctggcgcaaccacgcccatatctgctacgccaatcttatcgcgggtagggtcgtgcccttccaggtcccacccgacgccatgaatcgtcggatcatgaacgtccacgaggcagttaactgtctggagaccctatggtacacacgggtgcgtctggtggtcgtagggtggttcctgtatctggcgttcgtcgccctccaccaacgccgatgtatgtttggtgtcgtgagtcccgcccacaagatggtggccccggccacctacctcttgaactacgcaggccgcatcgtatcgagcgtgttcctgcagtacccctacacgaaaattacccgcctgctctgcgagctgtcggtccagcggcaaaacctggttcagttgtttgagacggacccggtcaccttcttgtaccaccgccccgccatcggggtcatcgtaggctgcgagttgatgctacgctttgtggccgtgggtctcatcgtcggcaccgctttcatatcccggggggcatgtgcaatcacataccccctgtttctgaccatcaccacctggtgttttgtctccaccatcggcctgacagagctgtattgtattctgcggcggggcccggcccccaagaacgcagacaaggccgccgccccggggcgatccaaggggctgtcgggcgtctgcgggcgctgctgttccatcatcctctcgggcatcgcagtgcgattgtgttatatcgccgtggtggccggggtggtgctcgtggcgcttcactacgagcaggagatccagaggcgcctgtttgatgtatgacgtcacatccaggccggcggaaaccggaacggcatatgcaaattggaaactgtcctgtcttggggcccacccacccgacgcgtcatatgcaaatgaaaatcggtcccccgaggccacgtgtagcctggatcccaacgaccccgcccatgggtcccaattggccgtcccgttaccaagaccaacccagccagcatatccacccccgcccgggtccccgcggaagcggaacggtgtatgtgatatgctaattaaatacatgccacgtacttatggtgtctgattggtccttgtctgtgccggaggtggggcgggggccccgcccggggggcggaacgaggaggggtttgggagagccggccccggcaccacgggtataaggacatccaccacccggccggtggtggtgtgcagccgtgttccaaccacggtcacgcttcggtgcctctccccgattcgggcccggtcgctcgctaccggtgcgccaccaccagaggccatatccgacaccccagccccgacggcagccgacagcccggtcatggcgactgacattgatatgctaattgacctcggcctggacctctccgacagcgatctggacgaggacccacccgagccggcggagagccgccgcgacgacctggaatcggacagcagcggggagtgttcctcgtcggacgaggacatggaagacccccacggagaggacggaccggagccgatactcgacgccgctcgcccggcggtccgcccgtctcgtccagaagaccccggcgtacccagcacccagacgcctcgtccgacggagcggcagggccccaacgatcctcaaccagcgccccacagtgtgtggtcgcgcctcggggcccggcgaccgtcttgctcccccgagcagcacgggggcaaggtggcccgcctccaacccccaccgaccaaagcccagcctgcccgcggcggacgccgcgggcgtcgcaggggtcggggtcgcggtggtcccggggccgccgatggtttgtcggacccccgccggcgtgcccccagaaccaatcgcaacccggggggaccccgccccggggcggggtggacggacggccccggcgccccccatggcgaggcgtggcgcggaagtgagcagcccgacccacccggaggcccgcggacacggggcgtgcgccaagcaccccccccgctaatgacgctggcgattgcccccccgcccgcggacccccgcgccccggccccggagcgaaaggcgcccgccgccgacaccatcgacgccaccacgcggttggtcctgcgctccatctccgagcgcgcggcggtcgaccgcatcagcgagagctttggccgcagcgcacaggtcatgcacgacccctttggggggcagccgtttcccgccgcgaatagcccctgggccccggtgttggcgggccaaggagggccctttgacgccgagaccagacgggtctcctgggaaaccttggtcgcccacggcccgagcctctatcgcacttttgccggcaatcctcgggccgcatcgaccgccaaggccatgcgcgactgcgtgctgcgccaagaaaatttcatcgaggcgctggcctccgccgacgagacgctggcgtggtgcaagatgtgcatccaccacaacctgccgctgcgcccccaggaccccattatcgggacggccgcggctgtgctggataacctcgccacgcgcctgcggccctttctccagtgctacctgaaggcgcgaggcctgtgcggcctggacgaactgtgttcgcggcggcgtctggcggacattaaggacattgcatccttcgtgtttgtcattctggccaggctcgccaaccgcgtcgagcgtggcgtcgcggagatcgactacgcgacccttggtgtcggggtcggagagaagatgcatttctacctccccggggcctgcatggcgggcctgatcgaaatcctagacacacaccgccaggagtgttcgagtcgtgtctgcgagttgacggccagtcacatcgtcgcccccccgtacgtgcacggcaaatatttttattgcaactccctgttttaggtacaataaaaacaaaacatttcaaacaaatcgccccacgtgttgtccttctttgctcatggccggcggggcgtgggtcacggcagatggcgggggtgggcccggcgtacggcctgggtgggcggagggaactaacccaacgtataaatccgtccccgctccaaggccggtgtcatagtgcccttaggagcttcccgcccgggcgcatccccccttttgcactatgacagcgacccccctcaccaacctgttcttacgggccccggacataacccacgtggcccccccttactgcctcaacgccacctggcaggccgaaacggccatgcacaccagcaaaacggactccgcttgcgtggccgtgcggagttacctggtccgcgcctcctgtgagaccagcggcacaatccactgctttttctttgcggtatacaaggacacccaccacacccctccgctgattaccgagctccgcaactttgcggacctggttaaccacccgccggtcctacgcgaactggaggataagcgcggggtgcggctgcggtgtgcgcggccgtttagcgtcgggacgattaaggacgtctctgggtccggcgcgtcctcggcgggagagtacacgataaacgggatcgtgtaccactgccactgtcggtatccgttctcaaaaacatgctggatgggggcctccgcggccctacagcacctgcgctccatcagctccagcggcatggccgcccgcgcggcagagcatcgacgcgtcaagattaaaattaaggcgtgatctccaacccccccatgaatgtgtgtaaccccccaaaaaaataaacagccgtaacccaatcaaaccaggcgtggtgtgagtttgtggacccaaagccctcagagacaacgcgacaggccagtatggaccgtgatacttttatttattaactcacaggggcgcttaccgccacaggaataccagaataatgaccaccactatcgcgaccaccccaaatacagcatggcgccccaccacgccacaacagccctgtcgccggtatggggcatgatcagacgagccgcgagccgcgcgttgggccctgtacagctcgcgcgaattgaccctaggaggccgccacgcgcccgagttttgcgttcgtcgctggtcgtcgggcgccaaagccccggacggctgttcggtcgaacgaacggccacgacagtggcataggttggggggtggtccgacatagcctcggcgtacgtcgggaggcccgacaagaggtcccttgagatgtcgggtggggccacaagcctggtttccggaagaaacaggggggttgccaataacccgccagggccaaaactccggcgctgcgcacgtcgttcggcgcggcgccgggcgcgccgagcggctcgctgggcggcttggcgtgagcggccccgctccgacgcctcgccctctccggaggaggttggcggaattggcacggacgacaggggcccagcagagtacggtggaggtgggtccgtgggggtgtccagatcaataacgacaaacggcccctcgttcctaccagacaagctatcgtaggggggcgggggatcagcaaacgcgttccccgcgctccatagacccgcgtcgggttgcgccgcctccgaagccatggatgcgccccaaagccacgactcccgcgcgctaggtccttggggtaagggaaaaggccctactccccatccaagccagccaagttaacgggctacgccttcggggatgggactggcaccccggcggattttgttgggctggtacgcgttgcccaaccgagggccgcgtccacgggacgcgccttttataaccccgggggtcattcccaacgatcacatgcaatctaactggctcccctctccccccctctcccctctccccccctctcccctctccccccctctcccctctccccccctctcccctctccccccctctcccctctccccccctctcccctctccccccctctcccctctccccccctctcccctctccccccctctcccctctccccccctctcccctctccccccctgctctttccccgtgacacccgacgctggggggcgtggctgccgggaggggccgcggatgggcggggcctactcggtctcccgcccccgcccccgaaccgccccgccggccttgcccccctttgatcccctgctacccccaacccgtgctcgtggtgcgggttgggtggggggggggagtgtgggcgggggtgtgcgggaggtgtcggtggtggtggtggtggtaggaatggtggtgaggggggggggcgctggttggtcaaaaaagggagggacgggggccggcagaccgacggcgacaacgctccccggcggccgggtcgcggctcttacgagcggcccggcccgcgctcccaccccccgggccgtgtccttgctttccccccgtctccccccccctccttctcctcctcctcctcctcgtttttccaaaccccgcccacccggcccggcccggcccggccaccgccgcccacccacccacctcgggagacccagccccggtcccccgttccccgggggccgttatctccagcgccccgtccggcgcgccgccccccgccgctaaaccccatcccgcccccgggaccccacatataagcccccagccacacgcaagaacagacacgcagaacggctgtgtttatttaaataaaccgatgtcggaataaacaaacacaaacacccgcgacggggggacggagggaggggggtgacgggggacgggaacagccacaaaaaacacccacaaaaaaaaacagccacccccgacacccccccccacccccagtctcttcgccttttcccccccaccccacgcccccactgagcccggtcgatcgacgagcacccccgcccccgcccctgccccggcgacccccggcccgcacgatcccgacaacaataacaaccccaacggaaagcggcggggtgtgggggggggcgaggaacaaccgaggggaacgggggatggaaggacgggaagtggaagtcctgatacccatcctacacccccctgccttccaccctccggccccccgcgagtccacccgccggccggctaccgagaccgaacacggcggccgccgcagccgccgcagccgccgccgacaccgcagagccggcgcgcgcacacacaagcggcagaggcagaaaggcccagagtcattgtttatgtggccgcgggccagcagacggcccgcgacacccccccccccgcccgtgtgggtatccggccccccgccccgcgccggtccattaagggcgcgcgtgcccgcgagatatcaatccgttaagtgctctgcagacaggggcaccgcgcccggaaatccattaggccgcagacgaggaaaataaaattacatcacctacccacgtggtgctgtggcctgtttttgctgcgtcatctgagcctttataaaagcgggggcgcggccgtgccgatcgcgggtggtgcgaaagactttccgggcgcgtccgggtgccgcggctctccgggcccccctgcagccggggcggccaaggggcgtcggcgacatcctccccctaagcgccggccggccgctggtctgttttttgttttccccgtttcgggggtggggggggttgcggtttctgtttctttaacccgtctggggtgtttttcgttccgtcgccggaatgtttcgttcgtctgtcccctcacggggcgaaggccgcgtacggcccgggacgagggggcccccgaccgcggcggtccgggccccgtccgggcccgctcgccggcacgcgacgcgaaaaaggccccccggaggcttttccgggttcccggcccggggcctgagataaacaatcggggttaccgccaacggccggcccccgtggcggcccggcccggggccccggcggacccaaggggccccggcccggggccccacaacggcccggcgcatgcgctgtggtttttttttctcggtgttttgtcgggctccgtcgcctttcctgttctcgcttctccccccccccccttcttcacccccagtaccctcctccctcccttcctcccccgttatcccactcgtcaagggcgccccggtgtggttcaacaaagacgccgcgtttccaggtaggttagacacctgcttctccccaatagaggggggggacccaaacgacagggggcgccccagaggctaaggtcggccacgccactcgcgggtgggctcgtgttacagcacaccagcccgttcttttccccccctcccacccttagtcagactctgttacttacccgtccgaccaccaactgcccccttatctaagggccggctggaagaccgccagggggtcggccggtgtcgctgtaaccccccacgccaatgacccacgtactccaagaaggcatgtgtcccaccccgcctgtgtttttgtgcctggctctctatgcttgggtcttactgccgggggggggggagtgcgggggagggggggtgtggaaggaaatgcacggcgcgtgtgtaccccccctaaagttgttcctaaagcgaggatatggaggagtggcgggtgccgggggaccggggtgatctctggcacgcgggggtgggaagggtcgggggaggggggatggggtaccggcccacctggccgacgcgggtgcgcgtgcctctgcacaccaaccccacgtcccccggcggtctctaagaagcaccgccccccctccttcataccaccgagcatgcctgggtgtgggttggtaaccaacacgcccatcccctcgtctcctgtgattctctggctgcaccgcattcttgttttctaactatgttcctgtttctgtctccccccccacccctccgccccaccccccaacacccacgtctgtggtgtggccgacccccttttgggcgccccgtcccgccccgccacccctcccgtcctttgttgccctatagtgtagttaacccccccccgccctttgtggcggccagaggccaggtcagtccgggcgggcaggcgctcgcggaaacttaacacccacacccaacccactgtggttctggctccatgccagtggcaggatgctttcggggatcggtggtcaggcagcccgggccgcggctctgtggttaacaccagagcctgcccaacatggcacccccactcccacgcacccccactcccacgcacccccactcccacgcacccccactcccacgcacccccactcccacgcacccccactcccacgcacccccactcccacgcacccccactcccacgcacccccactcccacgcacccccgagatccatccaacacagacagggaaaagatacaaaagtaaacctttatttcccaatagacagcaaaaatcccctgagttttttattagggccaacactaaagacccgctggtgtgtggtgcccgtgtctttcacttttcccctccccgacacggattggctggtgtagtgggcgcggccagagaccacccagcgcccgacccccccctccccacaaacacggggggcgtcccttattgttttccctcgtcccgggtcgacgccccctgctccccggaccacgggtgccgagaccgcaggctgcggaagtccagggcgcccactagggtgccctggtcgaacagcatgttccccacgggggtcatccagaggctgttccactccgacgcgggggccgtcgggtactcggggggcatcacgtggttacccgcggtctcggggagcagggtgcggcggctccagccggggaccgcggcccgcagccgggtcgccatgtttcccgtctggtccaccaggaccacgtacgccccgatgttccccgtctccatgtccaggatgggcaggcagtcccccgtgatcgtcttgttcacgtaaggcgacagggcgaccacgctagagacccccgagatgggcaggtagcgcgtgaggccgcccgcgggggcggccccggaagtctccgcgtggcgcgtcttccgggcacacttcctcggcccccgcggcccagaagcagcgcgggggccgagggaggtttcctcttgtctccctcccagggcaccgacggccccgcccgaggaggcggaagcggaggaggacgcggccccggcggcggaagaggcggcccccgcgggagtcggggccgaggaggaagaggcagaggaggaagaggcggaggccgccgaggacgtcaggggggtcccgggcccaccctggccgcgcccccccggccctgagtcggagggggggtgcgtcgccgccctcttggcccctgccggcgcgagggggggacgcgtggactggggggaggggttttcctggcccgacccgcgcctcttcctcggacgcaccgccgcctcctgctcgacagaggcggcggaggggagcgggggggcgccggagggggcggcgccgcgggagggcccgtgtccaccctccacgcccggcccccccgagccgcgcgccaccgtcgcacgcgcccggcacagactctgttcttggttcgcggcctgagccagggacgagtgcgactggggcacacggcgcgcgtccgcgggggccggggcgcgggggccgggccccggaggcggcgctcgcacgcacggggccacggccgcgcgggggcgcgcgggtcccgacgcggccgaggacgcggtgggcccggggcggggggcggagcctggcatgggcgccgcggggggcctgtggggagaggccgggggggagtcgctgatcactatggggtctctgttgtttgcaaggggggcgggtctgttgacaagggggcccgtccggcccctcggccgccccgcctccgcttcaacaaccccaaccccaaccccaacccccccggaggggccagacgccccccgcggcgccgcggctcgcgactggcgggagccgccgccgccgccgctgctgttggtggtggtgttggtgttactgctgccgtgtggcccgatgggcgccgaggggggcgctgtccgagccgcggccggctggggggctgcgtgagacgccccgcccgtcacggggggcgcggcggcgcctctgcgtgggggggcgcggggcgtccggcggggggcgggcggtacgtagtctgctgcaagagacaacggggggcgcgatcaggttacgccccctcccaggccctccctttccgcgcccgccctttcctcgcccccccgcccgcctattcctccctcccccctcctcctcctcctcccccagggtcctcgccgcccccccgcctcaccgtcgtccaggtcgtcgtcatcctcgtccgtggtgggctcagggtgggtgggcgacagggccctcaccgtgtgcccccccagggtcaggtaccgcggggcgaaccgctgattgcccgtccagataaagtccacggccgtgcccgccctgacggcctcctcggcctccatgcgggtctgggggtcgttcacgatcgggatggtgctgaacgacccgctgggcgtcacgcccactatcaggtacaccagcttggcgttgcacagcgggcaggtgttgcgcaattgcatccaggttttcatgcacgggatgcagaagcggtgcatgcacgggaaggtgtcgcagcgcaggtggggcgcgatctcatccgtgcacacggcgcacacgtcgccctcgtcgctccccccgtcctctcgagggggggcgcccccgcaactgccggggtcttcctcgcggggggggctcccccccgagaccgcccccccatccacgccctgcggccccagcagccccgtctcgaacagttccgtgtccgtgctgtccgcctcggaggcggagtcgtcgtcatggtggtcggcgtccccccgcccccccacttcggtctccgcctcagagtcgctgctgtccggcaggtctcggtcgcagggaaacacccagacatccggggcgggctaaggggaaaaaaaggggggcgggtaagaatggggggatttcccgcgtcaatcagcgcccacgagttccccctctccccccccccgcctcacaaagtcctgcccccctgctggcctcggaagaggggggagaaaggggtctgcaaccaaaggtggtctgggtccgtcctttggatcccgacccctcttcttccctcttctcccgccctccagacgcaccggagtcgggggtcccacggcgtcccccaaatatggcgggcggctcctccccacccccctagatgcgtgtgagtaagggggccctgcgtatgagtcagtggggaccacgccccctaacacggcgaccccggtccctgtgtgtttgttgtgggggcgtgtctctgtgtatgagtcagggggtcccacggcgaccccgggccctgcgtctgagtcaaaggggccatgtgtatgtgttggggggtctgtatatataaagtcagggggtcacatggcgacccccaacagggcgaccccggtccctgtatatatagggtcagggggttccgcgccccctaacatggcgcccccggtccctgtatatatagtgtcacggggttccacgccccctaacatggcgcccggctcccgtgtatgagtgggggtcccccaacatggcggccggttccagtgtaagggtcgggggtcccccaacatggcgccccccaatatggcgccccccaatatggcgccccagacatggcgcccggcccctcacctcgcgctgggggcggccctcaggccggcgggtactcgctccggggcggggctccatgggggtcgtatgcggttggagggtcgcggacggagggtccctgggggtcgcaacgtaggcggggcttctgtggtgatgcggagagggggcggcccgagtctgcctggctgctgcgtctcgctccgagtgccgaggtgcaaatgcgaccagactgtcgggccagggctaacttataccccacgcctttcccctccccaaaggggcggcagtgacgattcccccaatggccgcgcgtcccaggggaggcaggcccaccgcggggcggccccgtccccggggaccaacccggcgcccccaaagaatatcattagcatgcacggcccggcccccgatttgggggaccaacccggtgtcccccaaagaaccccattagcatgcccctcccaccgacgcaacaggggcttggcctgcgtcggtgccccggggcttcccgccttcccgaagaaactcattaccatacccggaaccccaggggaccaatgcgggttcattgagcgacccgcgggccaatgcgcgaggggccgtgtgttccgccaaaaaagcaattagcataacccggaaccccaggggagtggttacgcgcggcgcgggaggcggggaataccggggttgcccattaagggccgcgggaattgccggaagcgggaagggcggccggggccgcccattaatgagtttctaattaccataccgggaagcggaacaaggcctcttgcaagtttttaattaccataccgggaagtgggcggcccggcccattgggcggtaactcccgcccaatgggccgggccccgaagactcggcggacgctggttggccgggccccgccgcgctggcggccgccgattggccagtcccgcccccgaggcggcccgccctgtgagggcgggctggctccaagcgtatatatgcgcggctcctgccatcgtctctccggatctagagatctccggaattaattcgccctatagtgagtcggaattaggagcaatacccccgatccagcgtccaacaagaaccgccaccgccagagccacctccacctgacccgccgcctcctagatcttcttctgagatgagtttttgttctgaattcccgataggaatccccactgtgttgacctggtccttgagtcccagcaggctgtaggcaatacgcttctggtggccaggaagacgcactccgatccttttgatgtcttcgttggacatctgtaccaccttctcgatggccgtgtagccagccaccatgaagtgttccgtgtactgttgcatcttgatgctctccagccactcggacaccgtacggaaggggactccctccgagccgctggtgctgggcagccggatggacactcggggatcaaagtcagccagcgtcttgagggagtcgggggctcggatgagcttgtccaggatgctaacgatgtcggcaaacttgggtcggcgggagcgctcttgctgccagcactgcatcatgagctggtaaatggctgaagggcagtccatgggcgtagggagccggaagccgtcgttgatggctttcatgacctcgtggtttgacagttcccagtagggccgttcgccataagtcatcacttcccacatgacaatgccgtagctccacacatcgctggctgaggtgaacttgcggtaggaaatggcctctggggctgtccatcgaatagggatcttgccgccacttgtggtgtaggtggcctcggggtcatcttccagcacacgcgacaggccaaaatcggacaccttgcacaccaggttgctgttgacgaggatgttgcgggcggccaggtcccggtgcacgtagttcatgttggccaggtacttcatgccggatgcgatacccctcagcatgcccaccaactgaagtacactgaactcaccatccttctccctaaggaacttgtctagcgctccattctccatgtactctgtgataatcatcatgggtttgtatttagagaccacgccctccaggcggatgatattgtggtggctaaactggcccatgatgctggcctcgctcaggaagtccacccgctgcttctcagtgtagcccgctttcagtgtcttgatggccaccggtatctccttcttccccgaggatgccttcagcgtccctttatagacctctccaaactctcctgctccaatgaccttctgccttgccacacaggatgggtggatctcggtggtaaacttgagtacagcctggttggggtcttcgtaagtgtgaggatccacataggtcttcaggggctttagttgttctgacttggaaaaacggacatcctcagaggactggcgagcccgcaggttcctcctccttcgatggatgaagaggccaactcctgccagtaccagaagcaaaacaacacctacagccacaccgccgatcaccgccatgttggcagatccttccgtggacagtgtctggaactcgtgcactttgctgccggctccctggccctcctgcgtcagcgcctgcacctgcaccaggtacgtggtatccggagcaaggtcatccagggtcacggagaagccttccgtgcggcgcacattatagctgttggcatcccccttcttgcggtaggtgacttcgtacttccacacacggctctgctgtgacaccgggatgctccaggtgacactcagggaggtggtgcttcggtcctccagcctcactttggggggctctgtttggttaatactgacgctggcagtccggaagcttcggctagtcaccaggcctgagacaccattgcgtgcttcgacagcgaaggtatagttcatgtggggctccaggtcactgactgtcacactcgtgcgggtcagggcgtgaggaggttctgaatagcgcacgctcgcctcacagggcccacactcgccagactctggccagcactgttcgcaagtgacactgtagacaatgtcctggcggccaccagtgtccttgggagctgtccaacgcagttctactttggcacccatgccaatggccgtgaggtagttgggggcagagggtggacgtgtgcaagacatggacagtgggtcctcaggtgccctgaaatagccttcttcacactggcaggaggtggcaccctctgtggatggcagggtatgctctggacactccaggcaagggctctcagatgcctcagacttgaagaatcctggagaacaggctcggcaggcatcctcgaccttctcgtagccttcctggcacaggcactgcccgatgggcaccagccactcgccatccaccgtgcagtgcatgagaggcccctcgcccccataaggcaccacggcatggtccacgcaggtaccggccaccgtggccaggggttgtgtatcggagacagcgacagcaatggtctcggggaagcgagccaagctctgcagcatctcgggacacttcttgtagtagacgcgaacggagagcagcgccacgcaggcgccgatgtcctggaaggccaggtagaagcccttccgggtaaggggccccaccatgcgctcctctacgttcagcttgacattgcgagcctcgaagtcactgctgaccgtgatctcgtcaggggcgatggtgtcaatcttggtgaactggcgcttctggaagttggtgccatagtccacatctgactctgcatagtagaggttgaaggtctctttgcatgagctggcgccacccgggaagctgttacagtctcgcaccgtgaacttgagctcaataaagatgcgctcggcctcctcccggtacacccagttggtgcggagccagttgtcctggtcgccggataccacgttgcacaccgagtacatgtagataggcatgtcgtccatgatgttctgcatcaggtcccaccctttgccataggggtgcgtgagccagccgagctctcccttcattgctgcgaagtccaacaaaacaacttcctttccctgtgccgccgcggccgccagcgcgcaaccccacagcagcgccaggcagaaaccgactgcccggagctccatggtcgacccgggatccggtaccactttgtgcggccagcttcctaggagatcctctagctagagtcggtgtcttctatggaggtcaaaacagcgtggatggcgtctccaggcgatctgacggttcactaaaccagctctgcttatatagagctcggggagcagaagcgcgcgaacagaagcgagaagcgaactgattggttagttcaaataaggcacagggtcatttcaggtccttggggcaccctggaaacatctgatggttctctagaaactgctgagggcgggaccgcatctggggaccatctgttcttggccctgagcggggcaggaactgcttaccacagatatcctgtttggcccatattctcctgttccaactgttcttggccctgagcggggcaggaactgcttaccacagatatcctgtttggcccatattctcctgtttctctgttcctgaccttgatcctagcttgccaaacctacaggtggggtctttcattcccataggcggttacctgggactgtgcggttgggacggcgcccgtgggcccgggcggccgggggcggcgggggccgcgatggcggcggcggcgggccatggagacagagagcgtgccggggtggtagagtttgacaggcaagcatgtgcgtgcagaggcgagtagtgcttgcctgtctaactcgctcgtctcggccgcggggggcccgggctgcgccgccgcgctttaaagggccgcgcgcgacccccggggggtgtgtttcggggggggcccgttttccgctcctccccccgctcctccccccgctcctccccccgctcctccccccgctcctccccccgctcctccccccgctcctccccccgctcctccccccgctcctccccccgctcctccccccgctcctccccccgctcctccccccgctcctccccccgctcctccccccgctcctccccccgctcctccccccgctcctccccccgctcctccccccgctccccaacgcccgccgcgcgcgcgcacgccgcccggaccgccgcccgccttttttgcgcgccgccccgcccgcggggggcccgggctgccacaggtgtaacaacaccaacagaacaccaacagcacggcgcaccggcgactccggttcctcatccacacgtcacacgtcacgtcatccaccacacctgcccaccaacacaactcacagcgacaactcaccgcgcaacaactcctgttcctcatccacacgtcaccgcgcaccccccgctcctccagacgtcccccagcgcaacacgccgctcctgtcacacaccaccgccccagccctccccagccccagccctccccagccccagccctccccggccccagccctccccggccccagccctccccggccccagccctccccggccccagccctccccggccccagccctccccggccccagccctccccggccgcgtcccgcgctccctcgggggggttcgggcatctctacctcagtgccgccaatctcaggtcagagatccaaaccctccgggggcgcccgcgcaccaccaccgcccctcgccccctcccgcccctcgccccctcccgcccctcgccccctcccgcccctcgccccctcccgcccctcgccccctcccgcccctcgccccctcccgcccctcgccccctcccgcccctcgccccctcccgcccctcgccccctcccgcccctcgccccctcccgcccctcgccccctcccgcccctcgccccctcccgcccctcgccccctcccgcccctcgccccctcccgcccctcgccccctcccgcccctcgccccctcccgcccctcgccccctcccgcccctcgccccctcccgcccctcgccccctcccgcccctcgaaataaacaacgctactgcaaaactaaatcaggtcgttgtcgtttattgcgtcttcgggtttcgcaagcgccccgccccgtcccggcccgttacagcaccccgtccccctcgaacgcgccgccgtcgtcgtcgtcccaggcgccttcccagtccacaacttcccgtcgcgggggcgtggccaagcccgcctccgcccccagcacctccacggcccccgccgccgccagcacggtgccgctgcggcccgtggccgaggcccagcgaatcccgggcaacgccggcggcagggcccccgggccgtcgtcgtcgtcgtcgccgccgcgcagcaccagcgggggggcgtcgtcgtcgggctccagcagggcgcgggcgcaaaagtccctccgcggcccgcgccaccgggccgggccggcgcgcaccgcctcgcgccccagcgccacgtacacgggccgcagcggcgcgcccaggccccagcgcgcgcaggcgcggtgcgagtgggcctcctcctcgcagaagtccggcgcgccgggcgccatggcgtcggtggtccccgaggccgccgcccggccgtccagcgccggcagcacggcccggcggtactcgcgcggggacatgggcaccggcgtgtccgggccgaagcgcgtgcgcacgcggtagcgcacgttgccgccgcggcacaggcgcagcggcggcgcgtcggggtacaggcgcgcgtgcgcggcctccacgcgcgcgaagacccccgggccgaacacgcggcccggggccagcaccgtgcggcgcaggtcccgcgccgccggccagcgcacggcgcactgcacggcgggcagcaggtcgcacgccaggtaggcgtgctgccgcgacaccgcgggcccgtcggcgggccagtcgcaggcgcgcacggtgttgaccacgatgagccgccggtcgccggcgctggcgagcagccccagaaactccacggccccggcgaaggccaggtcccgcgtggacagcagcagcacgccctgcgcgcccagcgccgacacgtcgggggcgccggtccagttgcccgcccaggcggccgtgtccggcccgcacagccggttggccagggccgccagcaggcaggacagcccgccgcgctcggcggaccactccggcggcccccccgaggccccgccgccggccaggtcctcgcccggcagcggcgagtacagcaccaccacgcgcacgtcctcggggtcggggatctggcgcatccaggccgccatgcggcgcagcgggcccgaggcgcgcagggggccaaagaggcggcccccggcggccccgtgggggtgggggttatcgtcgtcgtcgccgccgccgcacgcggcctgggcggcggcggcgggcccggcgcaccgcgcggcgatcgaggccagggcccgcgggtcaaacatgagggccggtcgccaggggacggggaacagcgggtggtccgtgagctcggccacggcgcgcggggagcagtaggcctccagggcggcggccgcgggcgccgccgtgtggctgggccccgggggctgccgccgccagccgcccagggggtcggggccctcggcgggccggcgcgacagcgccacggggcgcgggcgggcctgcgccgcggcggcccggggcgccgcgggctgggcgggggcgggctcgggccccgggggcgtggaggggggcgcggggaggggggcgcgggcgtccgagccgggggcgtccgcgccgctcttcttcgtcttcgggggtcgcgggccgccgcctccgggcggccgggccgggccgggactcttgcgcttgcgcccctcccgcggcgcggcggaggcggcggcggccgccagcgcgtcggcggcgtccggtgcgctggcggccgccgccagcagggggcgcaggctctggttctcaaacagcaggtccgcggcggcggcggccgcggagctcggcaggcgcgggtcccgcggcagcgcggggcccagggccccggcgaccaggctcacggcgcgcacggcggccacggcggcctcgctgccgccggccacgcgcaggtccccgcgcaggcgcatgagcaccagcgcgtcgcgcacgaaccgcagctcgcgcagccacgcgcgcaggcggggcgcgtcggcgtgcggcggcggcggggaagcggggcccgcgggtccctccggccgcggggggctggcgggccgggccccggccagccccgggacggccgccaggtcgccgtcgaagccctcggccagcgcctccaggatcccgcggcaggcggccaggcactccacggccacgcggccggcctgggcgcggcgcccggcgtcgtcgtcggcgtcggcgtggcgggcggcgtcggggtcgtcgccccccgcgggggaggcgggcgcggcggacagccgccccagggcggcgaggatccccgcggcgccgtacccggcgggcaccgcgcgctcgcccggtgcggcggcggcggcgacgacggcggcggcgaccccctcgtcatctgcgccggcgccggggctccccgcggcccccgtcagcgccgcgttctcgcgcgccaacaggggcgcgtaggcgcggcgcaggctggtcagcaggaagcccttctgcgcgcggtcgtatcggcggctcatggccacggcggccgccgcgtgcgccaggccccagccgaagcggccggccgccatggcgtagcccaggtggggcacggcccgcgccacgctgccggtgatgaaggagctgctgttgcgcgcggcgcccgagatccggaagcaggcctggtccagcgccacgtccccggggaccacgcgcgggttctggagccaccccatggcctccgcgtccggggtgtacagcagccgcgtgatcagggcgtactgctgcgcggcgtcgcccagctcgggcgcccacacggccgccggggcgcccgaggcctcgaaccggcgtcgcgcctcctccgcctcgggcgccccccagaggcccgggcggctgtcgcccaggccgccgtacagcacccgccccgggggcgggggcccggcgccgggccacggctccccgctgacgtacccgtcgcgatagcgcgcgtagaaggcgccggaggccgcgtcggcgtccagctcgacccgccggggctgcccggccgtgaagcggcccgtggcgtcgcggccggccaccgccgcgcgggcccggcggcgctcgatgcggcccgcggaggccgcgggggtcctcgccgccgcccggggcttgggcgcggcctcggagagggggggtggcccgggcgggggcggcgtccgcccgggggcttccggcgccgcgctcgacggaccccgcccgacggcccgcgcctcgcgtgcgcggtcggccgcgtcgttgccgtcgtcgtcctcgtcctcgtcggacgacgaggacgaagaggatgcggacgacgaggacgaggacccggagtccgacgaggtcgatgacgccgatggccgccgccggccgtgacgacgtctccgcggcggctgggccggcgggcgcggcgacaggcggtccgtggggtccggatacgcgccgcgtagcggggcctcccgtgcgcggccccgggccggggcccggtcgccggcggcgtcggctgcgtcgtcgtactcgtccccgtcatcgtcgtcggctcgaaaggcgggggtccggggcggcgaggccgcggggtcgggcgtcgggatcgtccggacggcctcctctaccatggaggccagcagggccagctgtcgcggcgagacggcgtccccggcgtcctcgccggcgtcggtgcccgccgcgggggccctcccgtcccgccgggcgtcgtcgaggtcgtgggggtggtcggggtcgtggtcggggtcgtccccgccctcctccgtctccgcgccccacccgagggccccccgctcgtcgcggtctgggctcggggtgggcggcggcccgtcggtggggcccggggagccggggcgctgcttgttctccgacgccatcgccgatgcggggcgatcctccggggatacggctgcgacggcggacgtagcacggtaggtcacctacggactctcgatggggagggggcgagacccacggaccccgacgacccccgccgtcgacgcggaactagcgcggaccggtcgatgcttgggtgggaaaaaggacagggacggccgatccccctcccgcgcttcgtccgcgtatcggcgtcccggcgcggcgagcgtctgacggtctgtctctggcggtcccgcgtcgggtcgtggatccgtgtcggcagccgcgctccgtgtggacgatcggggcgtcctcgggctcatatagtcccaggggccggcgggaaggaggagcagcggaggccgccggccccccgccccccaggcgggcccgccccgaacggaattccattatgcacgaccccgccccgacgccggcacgccgggggcccgtggccgcggcccgttggtcgaacccccggccccgcccatccgcgccatctgccatgggcggggcgcgagggcgggtgggcccgcgccccgccccgcatggcatctcattaccgcccgatccggtggtttccgcttccgttccgcatgctaacgaggaacgggccgggggcggggcccgggccccgacttcccggttcggcggtaatgagatacgagccccgcgcgcccgttggccgtccccgggcccccggtcccgcccgccggacgttgggaccaacgggacggcgggcggcccaagggccgcccgccttgccgcccccccattggccggcgggcgggaccgccccaagggggcggggccgccgggtaaaagaagtgagaacgcgaagcgttcgcacttcgtcccaatatatatatattattagggcgaagtgcgagcactggcgccgtgcccgactccgcgccggccccgggggcgggcccgggcggcggggggcgggtctctccggcgcacataaaggcccggcgcgaccgacgcccgcagacggcgccggccacgaacgacgggagcggctgcggagcacgcggaccgggagcgggactcgcagagggccgtcggagcggacggcgtcggcatcgcgacgccccggctcgggatcgggatcgcatcggaaagggacacgcggaaagacccacccaccccacccacgaaacacaggggacgcaccccgggggcctccgacgacagaaacccaccggtccgcctttgtgcacgggtaagcaccttgggtgggcggaggagggggggacgcgggggcggaggaggggggacgcgggggcggaggaggggggacgcgggggcggaggaggggggacgcgggggcggaggaggggggacgcgggggcggaggagggggctcacccgcgttcgtgccttcccgcaggaggaacgtcctcgtcgaggcgaccggcggcgaccgttgcgtggaccgcttcctgctcgtcgggcggggggaagccactgtggtcctccgggacgttttctggatggccgacatttccccaggcgcttttgcgccttgtgtaaaagcgcggcgtcccgctctccgatccccgcccctgggcacgcgcaagcgcaagcgcccttcccgccccctctcatcggagtctgaggtagaatccgatacagccttggagtctgaggtcgaatccgagacagcatcggattcgaccgagtctggggaccaggatgaagccccccgcatcggtggccgtagggccccccggaggcttggggggcggttttttctggacatgtcggcggaatccaccacggggacggaaacggatgcgtcggtgtcggacgaccccgacgacacgtccgactggtcttatgacgacattcccccacgacccaagcgggcccgggtaaacctgcggctcacgagctctcccgatcggcgggatggggttatttttcctaagatggggcgggtccggtctacccgggaaacgcagccccgggcccccaccccgtcggccccaagcccaaatgcaatgctacggcgctcggtgcgccaggcccagaggcggagcagcgcacgatggacccccgacctgggctacatgcgccagtgtatcaatcagctgtttcgggtcctgcgggtcgcccgggacccccacggcagtgccaaccgcctgcgccacctgatacgcgactgttacctgatgggatactgccgagcccgtctggccccgcgcacgtggtgccgtttgctgcaggtgtccggcggaacctggggcatgcacctgcgcaacaccatacgggaggtggaggctcgattcgacgccaccgcggaacccgtgtgcaagcttccttgtttggagaccagacggtacggcccggagtgtgatcttagtaatctcgagattcatctcagcgcgacaagcgatgatgaaatctccgatgccaccgatctggaggccgccggttcggaccacacgctcgcgtcccagtccgacacggaggatgccccctcccccgttacgctggaaaccccagaaccccgcgggtccctcgctgtgcgtctggaggatgagtttggggagtttgactggaccccccaggagggctcccagccctggctgtctgcggtcgtggccgataccagctccgtggaacgcccgggcccatccgattctggggcgggtcgcgccgcagaagaccgcaagtgtctggacggctgccggaaaatgcgcttctccaccgcctgcccctatccgtgcagcgacacgtttctccggccgtgagtccggtcgccccgacccccttgtatgtccccaaataaaagaccaaaatcaaagcgtttgtcccagcgtcttaatggcgggaagggcggagagaaacagaccacgcgtacatggggggtgtttgggggtttattgacatcggggctacagggtggtaaccggatagcagatgtgaggaagtctgggccgttcgccgcgaacggcgatcagagggtccgtttcttgcggaccacggcccggtgatgtgggttgctcgtctgggatctcgggcatgcccatacacgcacaacacggacgccgcaccggatgggacgtcgtaagggggcctggggtagctgggtggggtttgtgcagagcaatcagggaccgcagccagcgcatacaatcgcgctcccgtccgtttgtcccgggcagtaccacgccgtactggtattcgtaccggctgagcagggtctccagggggtggttgggggccgcggggaacggggtccacgccacggtccactcgggcaaaaaccgagtcggcacggcccacggttctcccacccacgcgtctggggtcttgatggcgataaatcttaccccgagccggattttttgggcgtattcgagaaacggcacacacagatccgccgcgcctaccacccacaagtggtagaggcgaggggggctgggttggtctcggtgcagcagtcggaagcacgccacggcgtccacgacctcggtgctctccaaggggctgtcctccgcaaacaggcccgtggtggtgtttggggggcagcgacaggacctagtgcgcacgatcgggcgggtgggtttgggtaagtccatcagcggctcggccaaccgtcgaaggttggccggacgaacgacgaccggggtacccaggggttctgatgccaaaatgcggcactgcctaagcaggaagctccacagggccgggcttgcgtcgacggaagtccggggcagggcgttgttctggtcaaggagggtcattacgttgacgacaacaacgcccatgttggtatattacaggcccgtgtccgatttggggcacttgcagatttgtaaggccacgcacggcggggagacaggccgacgcgggggctgctctaaaaatttaagggccctacggtccacagacccgccttcccgggggggcccttggagcgaccggcagcggaggcgtccgggggaggggagggtgatttacgggggggtaggtcagggggtgggtcgtcaaactgccgctccttaaaaccccggggcccgtcgttcggggtgctcgttggttggcactcacggtgcggcgaatggcctgtcgtaagttttgtcgcgtttacgggggacagggcaggaggaaggaggaggccgtcccgccggagacaaagccgtcccgggtgtttcctcatggccccttttataccccagccgaggacgcgtgcctggactccccgcccccggagacccccaaaccttcccacaccacaccacccggcgatgccgagcgcctgtgtcatctgcaggagatcctggcccagatgtacggaaaccaggactaccccatagaggacgaccccagcgcggatgccgcggacgatgtcgacgaggacgccccggacgacgtggcctatccggaggaatacgcagaggagctttttctgcccggggacgcgcccggtccccttatcggggccaacgaccacatccctcccccgtgtggcgcatctccccccggtatacgacgacgcagccgggatgagattggggccacgggatttaccgcggaagaactggacgccatggacagggaggcggctcgagccatcagccgcggcggcaagcccccctcgaccatggccaagctggtgactggcatgggctttacgatccacggagcgctcaccccaggatcggaggggtgtgtctttgacagcagccacccagattacccccaacgggtaatcgtgaaggcggggtggtacacgagcacgagccacgaggcgcgactgctgaggcgactggaccaccccgcgatcctgcccctcctggacctgcatgtcgtctccggggtcacgtgtctggtcctccccaagtaccaggccgacctgtatacctatctgagtaggcgcctgaacccgctgggacgcccgcagatcgcagcggtctcccggcagctcctaagcgccgttgactacattcaccgccagggcattatccaccgcgacattaagaccgaaaatatttttattaacacccccgaggacatttgcctgggggactttggtgccgcgtgcttcgtgcagggttcccgatcaagccccttcccctacggaatcgccggaaccatcgacaccaacgcccccgaggtcctggccggggatccgtataccaccaccgtcgacatttggagcgccggtctggtgatcttcgagactgccgtccacaacgcgtccttgttctcggccccccgcggccccaaaaggggcccgtgcgacagtcagatcacccgcatcatccgacaggcccaggtccacgttgacgagttttccccgcatccagaatcgcgcctcacctcgcgctaccgctcccgcgcggccgggaacaatcgcccgccgtacacccgaccggcctggacccgctactacaagatggacatagacgtcgaatatctggtttgcaaagccctcaccttcgacggcgcgcttcgccccagcgccgcagagctgctttgtttgccgctgtttcaacagaaatgaccgcccccagggggcggtgctgtttgcgggttggcacaaaaagaccccgacccgcgtctgtggtgtttttggcatcatgtcgccgggcgccatgcgtgccgttgttcccattatcccattccttttggttcttgtcggtgtatcgggggttcccaccaacgtctcctccaccacccaaccccaactccagaccaccggtcgtccctcgcatgaagcccccaacatgacccagaccggcaccaccgactctcccaccgccatcagccttaccacgcccgaccacacaccccccatgccaagtatcggactggaggaggaggaagaggaggagggggccggggacggcgaacatcttgaggggggagatgggacccgtgacaccctaccccagtccccgggcccagccttcccgttggctgaggacgtcgagaaggacaaacccaaccgtcccgtagtcccatcccccgatcccaacaactcccccgcgcgccccgagaccagtcgcccgaagacaccccccaccattatcgggccgctggcaactcgccccacgacccgactcacctcaaagggacgacccttggttccgacgcctcaacataccccgctgttctcgttcctcactgcctcccccgccctggacaccctcttcgtcgtcagcaccgtcatccacaccttatcgtttttgtgtattggtgcgatggcgacacacctgtgtggcggttggtccagacgcgggcgacgcacacaccctagcgtgcgttacgtgtgcctgccgtccgaacgcgggtagggtatggggcgggggatggggagagcccacacgcggaaagcaagaacaataaaggcggtggtatctagttgatatgcatctctgggtgtttttggggtgtggcggacgcggggcggtcattggacggggtgcagttaaatacatgcccgggacccatgaagcatgcgcgacttccgggcctcggaacccacccgaaacggccaacggacgtctgagccaggcctggctatccggagaaacagcacacgacttggcgttctgtgtgtcgcgatgtctctgcgcgcagtctggcatctggggcttttgggaagcctcgtgggggctgttcttgccgccacccatcggggacctgcggccaacacaacggaccccttaacgcacgccccagtgtcccctcaccccagccccctggggggctttgccgtccccctcgtagtcggtgggctgtgcgccgtagtcctgggggcggcgtgtctgcttgagctcctgcgtcgtacgtgccgcgggtgggggcgttaccatccctacatggacccagttgtcgtataatttcccccccccccccccttctccgcatgggtgatgtcgggtccaaactcccgacaccaccagctggtatggtataaatcaccggtgcgccccccaaaccatgtccggcagggggatgggggggcgaatgcggagggcacccaacaacaccgggctaaccaggaaatccgtggccccggcccccaataaagatcgcggtagcccggccgtgtgacactatcgtccataccgaccacaccgacgaatcccctaagggggaggggccattttacgaggaggaggggtataacaaagtctgtctttaaaaagcaggggttagggagttgttcggtcataagcttcagcgcgaacgaccaactaccccgatcatcagttatccttaaggtctcttttgtgtggtgcgttccggtatggggggggctgccgccaggttgggggccgtgattttgtttgtcgtcatagtgggcctccatggggtccgcggcaaatatgccttggcggatgcctctctcaagatggccgaccccaatcgctttcgcggcaaagaccttccggtcctggaccagctgaccgaccctccgggggtccggcgcgtgtaccacatccaggcgggcctaccggacccgttccagccccccagcctcccgatcacggtttactacgccgtgttggagcgcgcctgccgcagcgtgctcctaaacgcaccgtcggaggccccccagattgtccgcggggcctccgaagacgtccggaaacaaccctacaacctgaccatcgcttggtttcggatgggaggcaactgtgctatccccatcacggtcatggagtacaccgaatgctcctacaacaagtctctgggggcctgtcccatccgaacgcagccccgctggaactactatgacagcttcagcgccgtcagcgaggataacctggggttcctgatgcacgcccccgcgtttgagaccgccggcacgtacctgcggctcgtgaagataaacgactggacggagattacacagtttatcctggagcaccgagccaagggctcctgtaagtacgccctcccgctgcgcatccccccgtcagcctgcctgtccccccaggcctaccagcagggggtgacggtggacagcatcgggatgctgccccgcttcatccccgagaaccagcgcaccgtcgccgtatacagcttgaagatcgccgggtggcacgggcccaaggccccatacacgagcaccctgctgcccccggagctgtccgagacccccaacgccacgcagccagaactcgccccggaagaccccgaggattcggccctcttggaggaccccgtggggacggtggcgccgcaaatcccaccaaactggcacataccgtcgatccaggacgccgcgacgccttaccatcccccggccaccccgaacaacatgggcctgatcgccggcgcggtgggcggcagtctcctggcagccctggtcatttgcggaattgtgtactggatgcgccgccgcactcaaaaagccccaaagcgcatacgcctcccccacatccgggaagacgaccagccgtcctcgcaccagcccttgttttactagatacccccccttaatgggtgcgggggggtcaggtctgcggggttgggatgggaccttaactccatataaagcgagtctggaaggggggaaaggcggacagtcgataagtcggtagcgggggacgcgcacctgttccgcctgtcgcacccacagctttttttgcgaaccgtcccgttccgggatgccgtgccgcccgttgcagggcctggtgctcgtgggcctctgggtctgtgccaccagcctggttgtccgtggccccacggtcagtctggtatcaaactcatttgtggacgccggggccttggggcccgacggcgtagtggaggaagacctgcttattctcggggagcttcgctttgtgggggaccaggtcccccacaccacctactacgatggggtcgtagagctgtggcactaccccatgggacacaaatgcccacgggtcgtgcatgtcgtcacggtgaccgcgtgcccacgtcgccccgccgtggctttcgccctgtgtcgcgcaaccgacagcactcacagccccgcatatcccaccctggagctgaatctggcccaacagccgcttttgcgggtccggagggcgacgcgtgactatgccggggtgtacgtgttacgcgtatgggtcggggacgcaccaaacgccagcctgtttgtcctggggatggccatagccgccgaagggactctggcgtacaacggctcggcccatggctcctgcgacccgaaactgcttccgtattcggccccgcgtctggccccggcgagcgtataccaacccgcccctaacccggcctccaccccctcgaccaccacctccaccccctcgaccaccacctccaccccctcgaccaccatccccgctccccaagcatcgaccacacccttccccacgggagacccaaaaccccaacctcacggggtcaaccacgaacccccatcgaatgccacgcgagcgacccgcgactcgcgatacgcgctaacggtgacccagataatccagatagccatccccgcgtccattatagccctggtgtttctggggagctgtatttgctttatacacagatgtcaacgccgctaccgacgctcccgccgcccgatttacaacccccagatacccactggcatctcatgcgcggtgaacgaagcggccatggcccgcctcggagccgagctcaaatcgcatccgagcaccccccccaaatcccggcgccggtcgtcacgcacaccaatgccctccctgacggccatcgccgaagagtcggagcccgcgggggcggctgggcttccgacgccccccgtggaccccacgacatccaccccaacgcctcccctgttggtataggtccacggccactggccgggggcaccacataaccgaccgcagtcactgagttgggaataaaccggtattatttacctatatacgtgtatgtccatttcttcccccccccccccggaaaccaaagaaggaaacaaagaatggatgggaggagttcaggaagccggggagagggcccgcggcgcatttaaggcgttgttgtgttgactttggctcttctggcgggttggtgcggtgctgtttgttgggctcccattttacccgaagatcggctgctatccccgggacatggatcgcggggcggtggtggggtttcttctcggtgtttgtgttgtatcgtgcttggcgggaacgcccaaaacgtcctggagacgggtgagtgtcggcgaggacgtttcgttgcttccagctccggggcctacggggcgcggcccgacccagaaactactatgggccgtggaacccctggatgggtgcggccccttacacccgtcgtgggtctcgctgatgccccccaagcaggtgcccgagacggtcgtggatgcggcgtgcatgcgcgctccggtcccgctggcgatggcgtacgcccccccggccccatctgcgaccgggggtctacggacggacttcgtgtggcaggagcgcgcggccgtggttaaccggagtctggttatttacggggtccgagagacggacagcggcctgtataccctgtctgtgggcgacataaaggacccggctcgccaagtggcctcggtggtcctggtggtgcaaccggccccagttccgaccccacccccgaccccagccgattacgacgaggatgacaatgacgagggcgagggcgaggacgaaagtctagccggcactcccgccagcgggaccccccggctcccgcctccccccgcccccccgaggtcttggcccagcgcccccgaagtctcacacgtgcgtggggtgaccgtgcgtatggagactccggaagctatcctgttttcccccggggaggcgtttagcacgaacgtctccatccatgccatcgcccacgacgaccagacctacaccatggacgtcgtctggttgaggttcgacgtgccgacctcgtgtgccgagatgcgaatatacgaatcgtgtctgtatcacccgcagctcccagagtgtctgtccccggccgacgctccgtgcgccgcgagtacgtggacgtctcgcctggccgtccgcagctacgcggggtgttccagaacaaaccccccgccgcgctgttcggccgaggctcacatggagcccttcccggggctggcgtggcaggcggcctccgtcaatctggagttccgggacgcgtccccacaacactccggcctgtatctgtgcgtggtgtacgtcaacgaccatattcacgcatggggccacattaccatcagcaccgcggcgcagtaccggaacgcggtggtggaacagcccctcccacagcgcggcgcggatttggccgagcccacccacccgcacgtcggggcccctccccacgcgcccccaacccacggcgccctgcggttaggggcggtgatgggggccgccctgctgctgtctgcgctggggttgtcggtgtgggcgtgtatgacctgttggcgcaggcgtgcctggcgggcggttaaaagcagggcctcgggtaaggggcccacgtacattcgcgtggccgacagcgagctgtacgcggactggagctcggacagcgagggagaacgcgaccaggtcccgtggctggcccccccggagagacccgactctccctccaccaatggatccggctttgagatcttatcaccaacggctccgtctgtatacccccgtagcgatgggcatcaatctcgccgccagctcacaacctttggatccggaaggcccgatcgccgttactcccaggcctccgattcgtccgtcttctggtaaggcgccccatcccgaggccccacgtcggtcgccgaactgggcgaccgccggcgaggtggacgtcggagacgagctaatcgcgatttccgacgaacgcggacccccccgacatgaccgcccgcccctcgccacgtcgaccgcgccctcgccacacccgcgacccccgggctacacggccgttgtctccccgatggccctccaggctgtcgacgccccctccctgtttgtcgcctggctggccgctcggtggctccggggggcttccggcctgggggccgtcctgtgtgggattgcgtggtatgtgacgtcaattgcccgaggcgcataaagggccggtggtccgcctagccgcagcaaattaaaaatcgtgagtcactgcgaccgcaacttcccacccggagctttcttccggcctcgatgacgtcccggctctccgatcccaactcctcagcgcgatccgacatgtccgtgccgctttatcccacggcctcgccagtttcggtcgaagcctactactcggaaagcgaagacgaggcggccaacgacttcctcgtacgcatgggccgccaacagtcggtattaaggcgtcgacgcagacgcacccgctgcgtcggcatggtgatcgcctgtctcctcgtggccgttctgtcgggcggatttggggcgctcctgatgtggctgctccgctaaaagaccgcatcgacacgcgcgtccttcttgtcgtctctcttcccccccatcaccccgcaatttgcacccagcctttaactacattaaattgggttcgattggcaatgttgtctcccggttgatttttgggtgggtggggagtgggtgggtggggagtgggtgggtggggagtgggtgggtggggagtgggtgggtggggagtgggtgggtggggagtgggtgggtggggagtgggtgggtggggagtgggtgggtggggagtgggtgggtggggagtggcaaggaagaaacaagcccgaccaccagacagaaaatgtaaccatacccaaaccgactctgggggctgtttgtggggtcggaaccataggatgaacaaaccaccccgtacctcccgcacccttgggtgcgggtggctcatcggcatctgtccggtatgggttgttccccacccacttgcgttcggacgtcttagaatcatggcggttttctatgccgacatcggttttctcccccgcaataagacacgatgcgataaaatctgtttgtgaaatttattaagggtacaaattgccctagcacaggggtggggttagggccgggtccccacacccaaacgcaccaaacagatgcaggcagtgggtcgagtacagccccgcgtacgaacacgtcgatgcgtgtgtcagacagcaccagaaagcacaggccatcaacaggtcgtgcatatgtcggtgggtttggacgcggggggccatggtggtgataaagttaatggccgccgtccgccagggccacaggggcgacgtctcttggttggcccggagccactgggtgtggaccagccgcgcgtggcggcccaacatggcccctgtagccgggggcgggggatcgcgcacgtttgcagcgcacatgcgagacacctcgaccacggttcggaagaaggcccggtggtccgcgggcaacatcaccaggtgcgcaagcgcccgggcgtccagagggtagagccctgagtcatccgaggttggctcatcgcccgggtcatgccgcaagtgcgtgtgggttgggcttccggtgggcgggacgcgaaccgcggtgtggagccctacgcgggcccgagcgtacgctccatcttgtggggagaaggggtctgggctcgccaggggggcatacttgcccgggctatacagacccgcgagccgtacgtggttcgcggggggtgcgtggggtccggggctcccggggaggccggggctcccggggttgtcgtggatccctggggtcacgcggtaccctggggtctctgggagctcgcggtactctgggttccctaggttctcggggtggtcgcggaacccggggctcccggggaacacgcggtgtcctggggattgttggcggtcggacggcttcagatggcttcgagatcgtagtgtccgcaccgactcgtagtagacccgaatctccacattgccccgccgcttgatcattatcaccccgttgcgggggtccggagatcatgcgcgggtgtcctcgaggtgcgtgaacacctctggggtgcatgccggcggacggcacgccttttaagtaaacatctgggtcgcccggcccaactggggccgggggttgggtctggctcatctcgagagccacggggggaaccaccctccgcccagaaacttgggcgatggtcgtacccgggactcaacgggttaccggattacggggactgtcggtcacggtcccgccggttcttcgatgtgccacacccaaggatgcgttgggggcgattttgggcagcagcccgggagagcgcagcagaggacgctccgggtcgtgcacggcggttttggccgcctcccggtcctcacgcccccttttattgatctcatcgcgtacgtcggcgtacgtcctgggcccaacccgcatgttgtccaggaaggtgtccgccatttccagggcccacgacatgctcccccgcccgacgagcaggaagcggtccacgcaacggtcgccgccggtcgccccgacgagcaggaagcggtccacgcaacggtcgccgccggtcgcctcgacgaggacgttcctcctgcgggaaggcacgaacgcgggtgagccccctcctccgcccccgcgtcccccctcctccgcccccgcgtcccccctcctccgcccccgcgtcccccctcctccgcccccgcgtcccccctcctccgcccccgcgtcccccctcctccgcccccgcgtcccccctcctccacccccgcgtccccccctcctccgcccacccaaggtgcttacccgtgcacaaaggcggaccggtgggtttctgtcgtcggaggcccccggggtgcgtcccctgtgtttcgtgggtggggtgggtgggtctttccgcgtgtccctttccgatgcgatcccgatcccgagccggggcgtcgcgatgccgacgccgtccgctccgacggccctctgcgagtcccgctcccggtccgcgtgctccgcagccgctcccgtcgttcgtggccggcgccgtctgcgggcgtcggtcgcgccgggcctttatgtgcgccggagagacccgccccccgccgcccgggcccgcccccggggccggcgcggagtcgggcacggcgccagtgctcgcacttcgccctaataatatatatatattgggacgaagtgcgaacgcttcgcgttctcacttcttttacccggcggccccgcccccttggggcggtcccgcccgccggccaatgggggggcggcaaggcgggcggcccttgggccgcccgccgtcccgttggtcccaacgtccggcgggcgggaccgggggcccggggacggccaacgggcgcgcggggctcgtatctcattaccgccgaaccgggaagtcggggcccgggccccgcccccggcccgttcctcgttagcatgcggaacggaagcggaaaccaccggatcgggcggtaatgagatgccatgcggggcggggcgcgggcccacccgccctcgcgccccgcccatggcagatggcgcggatgggcggggccgggggttcgaccaacgggccgcggccacgggcccccggcgtgccggcgtcggggcggggtcgtgcataatggaattccgttcggggcgggcccgcctggggggcggggggccggcggcctccgctgctcctccttcccgccggcccctgggactatatgagcccgaggacgccccgatcgtccacacggagcgcggctgccgacacggatccacgacccgacgcgggaccgccagagacagaccgtcagacgctcgccgcgccgggacgccgatacgcggacgaagcgcgggagggggatcggccgtccctgtcctttttcccacccaagcatcgaccggtccgcgctagttccgcgtcgacggcgggggtcgtcggggtccgtgggtctcgccccctccccatcgagagtccgtaggtgacctaccgtgctacgtccgccgtcgcagccgtatccccggaggatcgccccgcatcggcgatggcgtcggagaacaagcagcgccccggctccccgggccccaccgacgggccgccgcccaccccgagcccagaccgcgacgagcggggggccctcgggtggggcgcggagacggaggagggcggggacgaccccgaccacgaccccgaccacccccacgacctcgacgacgcccggcgggacgggagggcccccgcggcgggcaccgacgccggcgaggacgccggggacgccgtctcgccgcgacagctggccctgctggcctccatggtagaggaggccgtccggacgatcccgacgcccgaccccgcggcctcgccgccccggacccccgcctttcgagccgacgacgatgacggggacgagtacgacgacgcagccgacgccgccggcgaccgggccccggcccggggccgcgcacgggaggccccgctacgcggcgcgtatccggaccccacggaccgcctgtcgccgcgcccgccggcccagccgccgcggagacgtcgtcacggccggcggcggccatcggcgtcatcgacctcgtcggactccgggtcctcgtcctcgtcgtccgcatcctcttcgtcctcgtcgtccgacgaggacgaggacgacgacggcaacgacgcggccgaccgcgcacgcgaggcgcgggccgtcgggcggggtccgtcgagcgcggcgccggaagcccccgggcggacgccgcccccgcccgggccaccccccctctccgaggccgcgcccaagccccgggcggcggcgaggacccccgcggcctccgcgggccgcatcgagcgccgccgggcccgcgcggcggtggccggccgcgacgccacgggccgcttcacggccgggcagccccggcgggtcgagctggacgccgacgcggcctccggcgccttctacgcgcgctatcgcgacgggtacgtcagcggggagccgtggcccggcgccgggcccccgcccccggggcgggtgctgtacggcggcctgggcgacagccgcccgggcctctggggggcgcccgaggcggaggaggcgcgacgccggttcgaggcctcgggcgccccggcggccgtgtgggcgcccgagctgggcgacgccgcgcagcagtacgccctgatcacgcggctgctgtacaccccggacgcggaggccatggggtggctccagaacccgcgcgtggtccccggggacgtggcgctggaccaggcctgcttccggatctcgggcgccgcgcgcaacagcagctccttcatcaccggcagcgtggcgcgggccgtgccccacctgggctacgccatggcggccggccgcttcggctggggcctggcgcacgcggcggccgccgtggccatgagccgccgatacgaccgcgcgcagaagggcttcctgctgaccagcctgcgccgcgcctacgcgcccctgttggcgcgcgagaacgcggcgctgacgggggccgcggggagccccggcgccggcgcagatgacgagggggtcgccgccgccgtcgtcgccgccgccgccgcaccgggcgagcgcgcggtgcccgccgggtacggcgccgcggggatcctcgccgccctggggcggctgtccgccgcgcccgcctcccccgcggggggcgacgaccccgacgccgcccgccacgccgacgccgacgacgacgccgggcgccgcgcccaggccggccgcgtggccgtggagtgcctggccgcctgccgcgggatcctggaggcgctggccgagggcttcgacggcgacctggcggccgtcccggggctggccggggcccggcccgccagccccccgcggccggagggacccgcgggccccgcttccccgccgccgccgcacgccgacgcgccccgcctgcgcgcgtggctgcgcgagctgcggttcgtgcgcgacgcgctggtgctcatgcgcctgcgcggggacctgcgcgtggccggcggcagcgaggccgccgtggccgccgtgcgcgccgtgagcctggtcgccggggccctgggccccgcgctgccgcgggacccgcgcctgccgagctccgcggccgccgccgccgcggacctgctgtttgagaaccagagcctgcgccccctgctggcggcggccgccagcgcaccggacgccgccgacgcgctggcggccgccgccgcctccgccgcgccgcgggaggggcgcaagcgcaagagtcccggcccggcccggccgcccggaggcggcggcccgcgacccccgaagacgaagaagagcggcgcggacgcccccggctcggacgcccgcgcccccctccccgcgcccccctccacgcccccggggcccgagcccgcccccgcccagcccgcggcgccccgggccgccgcggcgcaggcccgcccgcgccccgtggcgctgtcgcgccggcccgccgagggccccgaccccctgggcggctggcggcggcagcccccggggcccagccacacggcggcgcccgcggccgccgccctggaggcctactgctccccgcgcgccgtggccgagctcacggaccacccgctgttccccgtcccctggcgaccggccctcatgtttgacccgcgggccctggcctcgatcgccgcgcggtgcgccgggcccgccgccgccgcccaggccgcgtgcggcggcggcgacgacgacgataacccccacccccacggggccgccgggggccgcctctttggccccctgcgcgcctcgggcccgctgcgccgcatggcggcctggatgcgccagatccccgaccccgaggacgtgcgcgtggtggtgctgtactcgccgctgccgggcgaggacctggccggcggcggggcctcgggggggccgccggagtggtccgccgagcgcggcgggctgtcctgcctgctggcggccctggccaaccggctgtgcgggccggacacggccgcctgggcgggcaactggaccggcgcccccgacgtgtcggcgctgggcgcgcagggcgtgctgctgctgtccacgcgggacctggccttcgccggggccgtggagtttctggggctgctcgccagcgccggcgaccggcggctcatcgtggtcaacaccgtgcgcgcctgcgactggcccgccgacgggcccgcggtgtcgcggcagcacgcctacctggcgtgcgacctgctgcccgccgtgcagtgcgccgtgcgctggccggcggcgcgggacctgcgccgcacggtgctggccccgggccgcgtgttcggcccgggggtcttcgcgcgcgtggaggccgcgcacgcgcgcctgtaccccgacgcgccgccgctgcgcctgtgccgcggcggcaacgtgcgctaccgcgtgcgcacgcgcttcggcccggacacgccggtgcccatgtccccgcgcgagtaccgccgggccgtgctgccggcgctggacggccgggcggcggcctcggggaccaccgacgccatggcgcccggcgcgccggacttctgcgaggaggaggcccactcgcaccgcgcctgcgcgcgctggggcctgggcgcgccgctgcggcccgtgtacgtggcgctggggcgcgaggcggtgcgcgccggcccggcccggtggcgcgggccgcggagggacttttgcgcccgcgccctgctggagcccgacgacgacgcccccccgctggtgctgcgcggcggcgacgacgacgacgacggcccgggggccctgccgccggcgttgcccgggattcgctgggcctcggccacgggccgcagcggcaccgtgctggcggcggcgggggccgtggaggtgctgggggcggaggcgggcttggccacgcccccgcgacgggaagttgtggactgggaaggcgcctgggacgacgacgacggcggcgcgttcgagggggacggggtgctgtaacgggccgggacggggcggggcgcttgcgaaacccgaagacgcaataaacgacaacgacctgatttagttttgcagtagcgttgtttatttcgaggggcgggagggggcgaggggcgggagggggcgaggggcgggagggggcgaggggcgggagggggcgaggggcgggagggggcgaggggcgggagggggcgaggggcgggagggggcgaggggcgggagggggcgaggggcgggagggggcgaggggcgggagggggcgaggggcgggagggggcgaggggcgggagggggcgaggggcgggagggggcgaggggcgggagggggcgaggggcgggagggggcgaggggcgggagggggcgaggggcgggagggggcgaggggcgggagggggcgaggggcgggagggggcgaggggcggtggtggtgcgcgggcgcccccggagggtttggatctctgacctgagattggcggcactgaggtagagatgcccgaacccccccgagggagcgcgggacgcggccggggagggctggggccggggagggctggggccggggagggctggggccggggagggctggggccggggagggctggggccggggagggctggggccggggagggctggggctggggagggctggggctggggagggctggggcggtggtgtgtgacaggagcggcgtgttgcgctgggggacgtctggaggagcggggggtgcgcggtgacgtgtggatgaggaacaggagttgttgcgcggtgagttgtcgctgtgagttgtgttggtgggcaggtgtggtggatgacgtgacgtgtgacgtgtggatgaggaaccggagtcgccggtgcgccgtgctgttggtgttctgttggtgttgttacacctgtggcagcccgggccccccgcgggcggggcggcgcgcaaaaaaggcgggcggcggtccgggcggcgtgcgcgcgcgcggcgggcgttgggggagcggggggaggagcggggggaggagcggggggaggagcggggggaggagcggggggaggagcggggggaggagcggggggaggagcggggggaggagcggggggaggagcggggggaggagcggggggaggagcggggggaggagcggggggaggagcggggggaggagcggggggaggagcggggggaggagcggggggaggagcggggggaggagcggaaaacgggccccccccgaaacacaccccccgggggtcgcgcgcggccctttaaagcg

SEQ ID NO: 7 - DNA, 159898 bp, Artificial Sequence
  C172 from HSV-C134 Complete Viral Genome v1 Chimeric HSV expressing EphA2-Ecto-ML
agcccgggccccccgcgggcggggcggcgcgcaaaaaaggcgggcggcggtccgggcggcgtgcgcgcgcgcggcgggcgttggggagcggggggaggagcggggggaggagcggggggaggagcggggggaggagcggggggaggagcggggggaggagcggggggaggagcggggggaggagcggggggaggagcggggggaggagcggggggaggagcggggggaggagcggggggaggagcggggggaggagcggggggaggagcggggggaggagcggggggaggagcggggggaggagcggaaaacgggccccccccgaaacacaccccccgggggtcgcgcgcggccctttaaagcgcggcggcgcagcccgggccccccgcggccgagacgagcgagttagacaggcaagcactactcgcctctgcacgcacatgcttgcctgtcaaactctaccaccccggcacgctctctgtctccatggcccgccgccgccgccatcgcggcccccgccgcccccggccgcccgggcccacgggcgccgtcccaaccgcacagtcccaggtaaccgcctatgggaatgaaagaccccacctgtaggtttggcaagctaggatcaaggtcaggaacagagaaacaggagaatatgggccaaacaggatatctgtggtaagcagttcctgccccgctcagggccaagaacagttggaacaggagaatatgggccaaacaggatatctgtggtaagcagttcctgccccgctcagggccaagaacagatggtccccagatgcggtcccgccctcagcagtttctagagaaccatcagatgtttccagggtgccccaaggacctgaaatgaccctgtgccttatttgaactaaccaatcagttcgcttctcgcttctgttcgcgcgcttctgctccccgagctctatataagcagagctggtttagtgaaccgtcagatcgcctggagacgccatccacgctgttttgacctccatagaagacaccgactctagctagaggatctcctaggaagctggccgcacaaagtggtaccggatcccgggtcgaccatggagctccgggcagtcggtttctgcctggcgctgctgtggggttgcgcgctggcggccgcggcggcacagggaaaggaagttgttttgttggacttcgcagcaatgaagggagagctcggctggctcacgcacccctatggcaaagggtgggacctgatgcagaacatcatggacgacatgcctatctacatgtactcggtgtgcaacgtggtatccggcgaccaggacaactggctccgcaccaactgggtgtaccgggaggaggccgagcgcatctttattgagctcaagttcacggtgcgagactgtaacagcttcccgggtggcgccagctcatgcaaagagaccttcaacctctactatgcagagtcagatgtggactatggcaccaacttccagaagcgccagttcaccaagattgacaccatcgcccctgacgagatcacggtcagcagtgacttcgaggctcgcaatgtcaagctgaacgtagaggagcgcatggtggggccccttacccggaagggcttctacctggccttccaggacatcggcgcctgcgtggcgctgctctccgttcgcgtctactacaagaagtgtcccgagatgctgcagagcttggctcgcttccccgagaccattgctgtcgctgtctccgatacacaacccctggccacggtggccggtacctgcgtggaccatgccgtggtgccttatgggggcgaggggcctctcatgcactgcacggtggatggcgagtggctggtgcccatcgggcagtgcctgtgccaggaaggctacgagaaggtcgaggatgcctgccgagcctgttctccaggattcttcaagtctgaggcatctgagagcccttgcctggagtgtccagagcataccctgccatccacagagggtgccacctcctgccagtgtgaagaaggctatttcagggcacctgaggacccactgtccatgtcttgcacacgtccaccctctgcccccaactacctcacggccattggcatgggtgccaaagtagaactgcgttggacagctcccaaggacactggtggccgccaggacattgtctacagtgtcacttgcgaacagtgctggccagagtctggcgagtgtgggccctgtgaggcgagcgtgcgctattcagaacctcctcacgccctgacccgcacgagtgtgacagtcagtgacctggagccccacatgaactataccttcgctgtcgaagcacgcaatggtgtctcaggcctggtgactagccgaagcttccggactgccagcgtcagtattaaccaaacagagccccccaaagtgaggctggaggaccgaagcaccacctccctgagtgtcacctggagcatcccggtgtcacagcagagccgtgtgtggaagtacgaagtcacctaccgcaagaagggggatgccaacagctataatgtgcgccgcacggaaggcttctccgtgaccctggatgaccttgctccggataccacgtacctggtgcaggtgcaggcgctgacgcaggagggccagggagccggcagcaaagtgcacgagttccagacactgtccacggaaggatctgggaattcagaacaaaaactcatctcagaagaagatctaggaggcggcgggtcaggtggaggtggctctggcggtggcggttaaaattccgactcactatagggcgaattaattccggagatctctagatccggagagacgatggcaggagccgcgcatatatacgcttggagccagcccgccctcacagggcgggccgcctcgggggcgggactggccaatcggcggccgccagcgcggcggggcccggccaaccagcgtccgccgagtcttcggggcccggcccattgggcgggagttaccgcccaatgggccgggccgcccacttcccggtatggtaattaaaaacttgcaagaggccttgttccgcttcccggtatggtaattagaaactcattaatgggcggccccggccgcccttcccgcttccggcaattcccgcggcccttaatgggcaaccccggtattccccgcctcccgcgccgcgcgtaaccactcccctggggttccgggttatgctaattgcttttttggcggaacacacggcccctcgcgcattggcccgcgggtcgctcaatgaacccgcattggtcccctggggttccgggtatggtaatgagtttcttcgggaaggcgggaagccccggggcaccgacgcaggccaagcccctgttgcgtcggtgggaggggcatgctaatggggttctttgggggacaccgggttggtcccccaaatcgggggccgggccgtgcatgctaatgatattctttgggggcgccgggttggtccccggggacggggccgccccgcggtgggcctgcctcccctgggacgcgcggccattgggggaatcgtcactgccgcccctttggggaggggaaaggcgtggggtataagttagccctggcccgacagtctggtcgcatttgcacctcggcactcggagcgagacgcagcagccaggcagactcgggccgccccctctccgcatcaccacagaagccccgcctacgttgcgacccccagggaccctccgtccgcgaccctccaaccgcatacgacccccatggagccccgccccggagcgagtacccgccggcctgagggccgcccccagcgcgaggtgaggggccgggcgccatgtctggggcgccatattggggggcgccatattggggggcgccatgttgggggacccccgacccttacactggaaccggccgccatgttgggggacccccactcatacacgggagccgggcgccatgttagggggcgtggaaccccgtgacactatatatacagggaccgggggcgccatgttagggggcgcggaaccccctgaccctatatatacagggaccggggtcgccctgttgggggtcgccatgtgaccccctgactttatatatacagaccccccaacacatacacatggcccctttgactcagacgcagggcccggggtcgccgtgggaccccctgactcatacacagagacacgcccccacaacaaacacacagggaccggggtcgccgtgttagggggcgtggtccccactgactcatacgcagggcccccttactcacacgcatctaggggggtggggaggagccgcccgccatatttgggggacgccgtgggacccccgactccggtgcgtctggagggcgggagaagagggaagaagaggggtcgggatccaaaggacggacccagaccacctttggttgcagacccctttctcccccctcttccgaggccagcaggggggcaggactttgtgaggcggggggggggagagggggaactcgtgggcgctgattgacgcgggaaatccccccattcttacccgcccccctttttttccccttagcccgccccggatgtctgggtgtttccctgcgaccgagacctgccggacagcagcgactctgaggcggagaccgaagtgggggggcggggggacgccgaccaccatgacgacgactccgcctccgaggcggacagcacggacacggaactgttcgagacggggctgctggggccgcagggcgtggatgggggggcggtctcgggggggagccccccccgcgaggaagaccccggcagttgcgggggcgccccccctcgagaggacggggggagcgacgagggcgacgtgtgcgccgtgtgcacggatgagatcgcgccccacctgcgctgcgacaccttcccgtgcatgcaccgcttctgcatcccgtgcatgaaaacctggatgcaattgcgcaacacctgcccgctgtgcaacgccaagctggtgtacctgatagtgggcgtgacgcccagcgggtcgttcagcaccatcccgatcgtgaacgacccccagacccgcatggaggccgaggaggccgtcagggcgggcacggccgtggactttatctggacgggcaatcagcggttcgccccgcggtacctgaccctgggggggcacacggtgagggccctgtcgcccacccaccctgagcccaccacggacgaggatgacgacgacctggacgacggtgaggcgggggggcggcgaggaccctgggggaggaggaggaggaggggggagggaggaataggcgggcgggggggcgaggaaagggcgggcgcggaaagggagggcctgggagggggcgtaacctgatcgcgccccccgttgtctcttgcagcagactacgtaccgcccgccccccgccggacgccccgcgcccccccacgcagaggcgccgccgcgccccccgtgacgggcggggcgtctcacgcagccccccagccggccgcggctcggacagcgcccccctcggcgcccatcgggccacacggcagcagtaacaccaacaccaccaccaacagcagcggcggcggcggcggctcccgccagtcgcgagccgcggcgccgcggggggcgtctggcccctccgggggggttggggttggggttggggttgttgaagcggaggcggggcggccgaggggccggacgggcccccttgtcaacagacccgccccccttgcaaacaacagagaccccatagtgatcagcgactcccccccggcctctccccacaggccccccgcggcgcccatgccaggctccgccccccgccccgggcccaccgcgtcctcggccgcgtcgggacccgcgcgcccccgcgcggccgtggccccgtgcgtgcgagcgccgcctccggggcccggcccccgcgccccggcccccgcggacgcgcgccgtgtgccccagtcgcactcgtccctggctcaggccgcgaaccaagaacagagtctgtgccgggcgcgtgcgacggtggcgcgcggctcgggggggccgggcgtggagggtggacacgggccctcccgcggcgccgccccctccggcgcccccccgctcccctccgccgcctctgtcgagcaggaggcggcggtgcgtccgaggaagaggcgcgggtcgggccaggaaaacccctccccccagtccacgcgtccccccctcgcgccggcaggggccaagagggcggcgacgcaccccccctccgactcagggccgggggggcgcggccagggtgggcccgggacccccctgacgtcctcggcggcctccgcctcttcctcctctgcctcttcctcctcggccccgactcccgcgggggccgcctcttccgccgccggggccgcgtcctcctccgcttccgcctcctcgggcggggccgtcggtgccctgggagggagacaagaggaaacctccctcggcccccgcgctgcttctgggccgcgggggccgaggaagtgtgcccggaagacgcgccacgcggagacttccggggccgcccccgcgggcggcctcacgcgctacctgcccatctcgggggtctctagcgtggtcgccctgtcgccttacgtgaacaagacgatcacgggggactgcctgcccatcctggacatggagacggggaacatcggggcgtacgtggtcctggtggaccagacgggaaacatggcgacccggctgcgggccgcggtccccggctggagccgccgcaccctgctccccgagaccgcgggtaaccacgtgatgccccccgagtacccgacggcccccgcgtcggagtggaacagcctctggatgacccccgtggggaacatgctgttcgaccagggcaccctagtgggcgccctggacttccgcagcctgcggtctcggcacccgtggtccggggagcagggggcgtcgacccgggacgagggaaaacaataagggacgccccccgtgtttgtggggaggggggggtcgggcgctgggtggtctctggccgcgcccactacaccagccaatccgtgtcggggaggggaaaagtgaaagacacgggcaccacacaccagcgggtctttagtgttggccctaataaaaaactcaggggatttttgctgtctattgggaaataaaggtttacttttgtatcttttccctgtctgtgttggatggatctcgggggtgcgtgggagtgggggtgcgtgggagtgggggtgcgtgggagtgggggtgcgtgggagtgggggtgcgtgggagtgggggtgcgtgggagtgggggtgcgtgggagtgggggtgcgtgggagtgggggtgcgtgggagtgggggtgccatgttgggcaggctctggtgttaaccacagagccgcggcccgggctgcctgaccaccgatccccgaaagcatcctgccactggcatggagccagaaccacagtgggttgggtgtgggtgttaagtttccgcgagcgcctgcccgcccggactgacctggcctctggccgccacaaagggcgggggggggttaactacactatagggcaacaaaggacgggaggggtggcggggcgggacggggcgcccaaaagggggtcggccacaccacagacgtgggtgttggggggtggggcggaggggtggggggggagacagaaacaggaacatagttagaaaacaagaatgcggtgcagccagagaatcacaggagacgaggggatgggcgtgttggttaccaacccacacccaggcatgctcggtggtatgaaggagggggggcggtgcttcttagagaccgccgggggacgtggggttggtgtgcagaggcacgcgcacccgcgtcggccaggtgggccggtaccccatcccccctcccccgacccttcccacccccgcgtgccagagatcaccccggtcccccggcacccgccactcctccatatcctcgctttaggaacaactttagggggggtacacacgcgccgtgcatttccttccacaccccccctcccccgcactcccccccccccggcagtaagacccaagcatagagagccaggcacaaaaacacaggcggggtgggacacatgccttcttggagtacgtgggtcattggcgtggggggttacagcgacaccggccgaccccctggcggtcttccagccggcccttagataagggggcagttggtggtcggacgggtaagtaacagagtctgactaagggtgggagggggggaaaagaacgggctggtgtgctgtaacacgagcccacccgcgagtggcgtggccgaccttagcctctggggcgccccctgtcgtttgggtcccccccctctattggggagaagcaggtgtctaacctacctggaaacgcggcgtctttgttgaaccacaccggggcgcccttgacgagtgggataacgggggaggaagggagggaggagggtactgggggtgaagaaggggggggggggagaagcgagaacaggaaaggcgacggagcccgacaaaacaccgagaaaaaaaaaccacagcgcatgcgccgggccgttgtggggccccgggccggggccccttgggtccgccggggccccgggccgggccgccacgggggccggccgttggcggtaaccccgattgtttatctcaggccccgggccgggaacccggaaaagcctccggggggcctttttcgcgtcgcgtgccggcgagcgggcccggacggggcccggaccgccgcggtcgggggccccctcgtcccgggccgtacgcggccttcgccccgtgaggggacagacgaacgaaacattccggcgacggaacgaaaaacaccccagacgggttaaagaaacagaaaccgcaaccccccccacccccgaaacggggaaaacaaaaaacagaccagcggccggccggcgcttagggggaggatgtcgccgacgccccttggccgccccggctgcaggggggcccggagagccgcggcacccggacgcgcccggaaagtctttcgcaccacccgcgatcggcacggccgcgcccccgcttttataaaggctcagatgacgcagcaaaaacaggccacagcaccacgtgggtaggtgatgtaattttattttcctcgtctgcggcctaatggatttccgggcgcggtgcccctgtctgcagagcacttaacggattgatatctcgcgggcacgcgcgcccttaatggaccggcgcggggcggggggccggatacccacacgggcgggggggggggtgtcgcgggccgtctgctggcccgcggccacataaacaatgactctgggcctttctgcctctgccgcttgtgtgtgcgcgcgccggctctgcggtgtcggcggcggctgcggcggctgcggcggccgccgtgttcggtctcggtagccggccggcgggtggactcgcggggggccggagggtggaaggcaggggggtgtaggatgggtatcaggacttccacttcccgtccttccatcccccgttcccctcggttgttcctcgcccccccccacaccccgccgctttccgttggggttgttattgttgtcgggatcgtgcgggccgggggtcgccggggcaggggcgggggcgggggtgctcgtcgatcgaccgggctcagtgggggcgtggggtgggggggaaaaggcgaagagactgggggtgggggggggtgtcgggggtggctgtttttttttgtgggtgttttttgtggctgttcccgtcccccgtcacccccctccctccgtccccccgtcgcgggtgtttgtgtttgtttattccgacatcggtttatttaaataaacacagccgttctgcgtgtctgttcttgcgtgtggctgggggcttatatgtggggtcccgggggcgggatggggtttagcggcggggggcggcgcgccggacggggcgctggagataacggcccccggggaacgggggaccggggctgggtctcccgaggtgggtgggtgggcggcggtggccgggccgggccgggccgggtgggcggggtttggaaaaacgaggaggaggaggaggagaaggagggggggggagacggggggaaagcaaggacacggcccggggggtgggagcgcgggccgggccgctcgtaagagccgcgacccggccgccggggagcgttgtcgccgtcggtctgccggcccccgtccctcccttttttgaccaaccagcgcccccccccctcaccaccattcctaccaccaccaccaccaccgacacctcccgcacacccccgcccacactccccccccccacccaacccgcaccacgagcacgggttgggggtagcaggggatcaaaggggggcaaggccggcggggcggttcgggggcgggggcgggagaccgagtaggccccgcccatccgcggcccctcccggcagccacgccccccagcgtcgggtgtcacggggaaagagcagggggagaggggagagggggggagaggggagagggggggagaggggagagggggggagaggggagagggggggagaggggagagggggggagaggggagagggggggagaggggagagggggggagaggggagagggggggagaggggagagggggggagaggggagagggggggagagggggtatataaaccaacgaaaagcgcgggaacggggatacggggcttgtgtggcacgacgtcgtggttgtgttactgggcaaacacttggggactgtaggtttctgtgggtgccgaccctaggcgctatggggattttgggttgggtcgggcttattgccgttggggttttgtgtgtgcgggggggcttgtcttcaaccgaatatgttattcggagtcgggtggctcgagaggtgggggatatattaaaggtgccttgtgtgccgctcccgtctgacgatcttgattggcgttacgagaccccctcggctataaactatgctttgatagacggtatatttttgcgttatcactgtcccggattggacacggtcttgtgggataggcatgcccagaaggcatattgggttaacccctttttatttgtggcgggttttttggaggacttgagtcaccccgcatttcctgccaacacccaggaaacagaaacgcgcttggccctttataaagagatacgccaggcgctggacagtcgcaagcaggccgccagccacacacctgtgaaggctgggtgtgtgaactttgactattcgcgcacccgccgctgtgtagggcgacaggatttgggacctaccaacggaacgtctggacggaccccggttctgccgccggacgatgaagcgggcctgcagccgaagcccctcaccacgccgccgcccatcatcgccacgttggaccccaccccgcgacgggacgccgccgcaaaaagcagacgccgacgaccccactcccggcgcatctaatgatgccgcgacggaaacccgtccgggttcggggggcgaaccggccgcctgtcgctcgtcagggccggcgggcgctcctcgccgccctagaggctgtcccgctggtgtgacgttttcctcgtccgcgccccccgaccctcccatggatttaacaaacgggggggtgtcgcctgtggcgacctcggcgcctctggactggaccacgtttcggcgtgtgtttctgatcgacgacgcgtggcggcccctgttggagcctgagctggcgaaccccttaaccgcccacctcctgaccgaatataatcgtcggtgccagaccgaagaggtgctgccgccgcgggaggatgtgttttcgtggactcgttattgcacccccgacgaggtgcgcgtggttatcatcggccaggacccatatcaccaccccggccaggcgcacggacttgcgtttagcgtgcgcgcgaacgtgccgcctcccccgagtcttcggaatgtcttggcggccgtcaagaactgttatcccgaggcacggatgagcggccacggttgcctggaaaagtgggcgcgggacggcgtcctgttactaaacacgaccctgaccgtcaagcgcggggcggcggcgtcccactctagaatcggttgggaccgcttcgtgggcggagttatccgccggttggccgcgcgccgccccggcctggtgtttatgctctggggcgcacatgcccagaatgccatcaggccggaccctcgggtccattgcgtcctcaagttttcgcacccgtcgcccctctccaaggttccgttcggaacatgccagcatttcctcgtggcgaatcgatatctcgagacccggtcgatttcacccatcgactggtcggtttgaaaggcatcgacgtccggggttttcgtctgtgggggcttttgggtatttccgatgaataaagacggttaatggttaaacctctggtctcatacgggtcggtgatgtcgggcgtcgggggagagggagttccctctgcgcttgcgattctagcctcgtggggctggacgttcgacacgccaaaccacgagtcagggatatcgccagatacgactcccgcagattccattcggggggccgctgtggcctcacctgaccaacctttacacgggggcccggaacgggaggccacagcgccgtctttctccccaacgcgcgcggatgacggcccgccctgtaccgacgggccctacgtgacgtttgataccctgtttatggtgtcgtcgatcgacgaattagggcgtcgccagctcacggacaccatccgcaaggacctgcggttgtcgctggccaagtttagcattgcgtgcaccaagacctcctcgttttcgggaaacgccccgcgccaccacagacgcggggcgttccagcgcggcacgcgggcgccgcgcagcaacaaaagccttcagatgtttgtgttgtgcaaacgcacccacgccgctcgagtgcgagagcagcttcgggtcgttattcagtcccgcaagccgcgcaagtattacacgcgatcttcggacgggcggctctgccccgccgtccccgtgttcgtccacgagttcgtctcgtccgagccaatgcgcctccaccgagataacgtcatgctggcctcgggggccgagtaaccgcccccccgcgccaccctcactgcccgtcgcgcgtgtttgatgttaataaataacgcataaattatcttaatagatctcccgatcccctatggtgcactctcagtacaatctgctctgatgccgcatagttaagccagtatctgctccctgcttgtgtgttggaggtcgctgagtagtgcgcgagcaaaatttaagctacaacaaggcaaggcttgaccgacaattgcatgaagaatctgcttagggttaggcgttttgcgctgcttcgcgatgtacgggccagatatacgcgttgacattgattattgactagttattaatagtaatcaattacggggtcattagttcatagcccatatatggagttccacgttacataacttacggtaaatggcccgcctggctgaccgcccaacgacccccgcccattgacgtcaataatgacgtatgttcccatagtaacgccaatagggactttccattgacgtcaatgggtggagtatttacggtaaactgcccacttggcagtacatcaagtgtatcatatgccaagtacgccccctattgacgtcaatgacggtaaatggcccgcctggcattatgcccagtacatgaccttatgggactttcctacttggcagtacatctacgtattagtcatcgctattaccatggtgatgcggttttggcagtacatcaatgggcgtggatagcggtttgactcacggggatttccaagtctccaccccattgacgtcaatgggagtttgttttggcaccaaaatcaacgggactttccaaaatgtcgtaacaactccgccccattgacgcaaatgggcggtaggcgtgtacggtgggaggtctatataagcagagctctctggctaactagagaacccactgcttactggcttatcgaaattaatacgactcactatagggagacccaagctggctagttaagcttggtaccgagctcggatccactagtccagtgtggtggaattgcccttggatcctcaatggcccagcgcaacggcatgtcgccgcgccccccgcccctcggtcgcggccgcggggccggagggccttcgggggttggttcctctcctccttcttcttgtgtgccgatgggagcgccgtccacagcgggcactggtgcgagtgctgcggctacgacgacgccgggccacggcgtccaccgggtagaaccccgcgggccgccgggcgcccctccgagtagcgacaacaatggcaacttttggcacggcccggagcgcctgttgctgtctcagattccggtggagcgccaggcgctgacggagctggaataccaggccatgggcgccgtgtggcgcgcggcgtttttggccaacagcacgggccgcgccatgcgcaagtggtcgcagcgcgacgcgggcacgctgctgccgctcggacggccgtacggattctacgcgcgggtgacgccgcgcagccagatgaacggcgtgggcgcgacggacctgcgtcaactgtcgccgcgggacgcgtggatcgtactggtggctaccgtggtgcacgaggtggaccccgcagccgacccgacgttgggcgacaaggccggccatcccgagggtctgtgcgcgcaggacggactgtacctggcgctgggcgccgggttccgcgtgttcgtgtacgacctggcaaacaacacgctgatcctagcggcgcgcgacgcggacgagtggtttcggcacggcgcgggcgaggtggtgcggctgtaccgctgcaaccggctgggcgtgggcaccccgcgcgcgacgctgctgcctcagccggcgctccgacagacgttgctgcgcgccgaggaggcgacggcgctcggacgggagctgcgccggcggtgggccggcacgacggtggcgctgcagacgccgggcaggcgactgcagccgatggtactgctgggcgcgtggcaggagctggcgcagtacgagccgttcgcgtcggcgccgcaccccgcgtcgctgctgacggccgtgcgtcggcacctgaaccagcgtctgtgctgcggctggctggcgctgggcgcggtgctgcccgcgcggtggctgggctgcgcggcggggccggcgacggggacggcggcggggacgacgtcgccgccagcggcgagcggcacggagacggaggccgccggcggggacgcgccgtgcgcgatagcgggagccgtggggtccgctgtacctgtgcctccgcagccgtacggcgccgccggcgggggcgcgatttgcgtgcctaacgcggacgcgcacgcggtggtcggggcggacgcggcagcagcagcggcgccgacggtgatggtgggttcgacagcgatggcgggtccggcggcgtcggggaccgtgccgcgcgccatgctggtggtgctgctggacgagctgggcgccgtgttcgggtactgcccgctggacgggcacgtgtacccgctggcggcggagctgtcgcactttctgcgcgcgggcgtgctgggcgcgctggcgctgggacgcgagtcggcgcccgccgccgaggccgcgcggcggctgctgcccgagctggaccgcgagcagtgggagcggccgcgctgggacgcgctgcacctgcacccgcgcgccgcgctgtgggcgcgcgagccgcacgggcagtgggagttcatgtttcgcgaacaacgcggtgaccccataaatgatcccctcgcatttcgtctttcggacgctcgaactctcggtctcgacctcaccaccgtcatgacagagcgtcaaagtcaattgcccgaaaagtatatcggtttctatcagattaggaaacctccttggctcatggaacaacctccacccccatctcgccaaaccaaaccggacgctgcaacgatgcccccaccgctcagtgctcaggcaagcgtcagctacgcgctccgatacgatgacgagtcctggcgcccgctcagcacagttgacgaccacaaagcctggttggatctcgacgaatcacattgggtcctcggggacagccgacccgacgatataaaacaacgcagactgctgaaggccactcaacgacgaggcgccgaaatcgacagacccatgcctgtcgtgcctgaagaatgttacgaccaacgcttcactaccgaaggccaccaggtcatcccgttgtgcgcgtccgaacccgaggatgacgacgaagatcctacctacgacgaattgccgtcgcgcccaccccagaaacataagccgccagacaaacctccgcgcttatgcaaaacgggccccggcccacctccgctgccgccaaagcaacggcacggttccaccgacggaaaagtttctgcgccccgacagtcggagcatcataaaagacagacccgaccgccaaggccgccaccgcccaaattcggggatagaaccgcggcccatctctcgcaaaatatgcgggacatgtacctcgatatgtgtacatcttcgggccacaggccacggccgccagcacctccgcggccgaaaaaatgtcaaacacacgcccctcaccacgttcatcataagcttaagggcaattctgcagatatccagcacagtggcggccgctcgagtctagagggcccgcggttcgaaggtaagcctatccctaaccctctcctcggtctcgattctacgcgtaccggtcatcatcaccatcaccattgagtttaaacccgctgatcagcctcgactgtgccttctagttgccagccatctgttgtttgcccctcccccgtgccttccttgaccctggaaggtgccactcccactgtcctttcctaataaaatgaggaaattgcatcgcattgtctgagtaggtgtcattctattctggggggtggggtggggcaggacagcaagggggaggattgggaagacaatagcaggcatgctggggatgcggtgggctctatggcttctgaggcggaaagaaccagctggggctctagggggtatccccacgcgccctgtagcggcgcattaagcgcggcgggtgtggtggttacgcgcagcgtgaccgctacacttgccagcgccctagcgcccgctcctttcgctttcttcccttcctttctcgccacgttcgccggctttccccgtcaagctctaaatcgggggctccctttagggttccgatttagtgctttacggcacctcgaccccaaaaaacttgattagggtgatggttcacgtagtgggccatcgccctgatagacggtttttcgccctttgacgttggagtccacgttctttaatagtggactcttgttccaaactggaacaacactcaaccctatctcggtctattcttttgatttataagggattttgccgatttcggcctattggttaaaaaatgagctgatttaacaaaaatttaacgcgaattaattctgtggaatgtgtgtcagttagggtgtggaaagtccccaggctccccagcaggcagaagtatgcaaagcatgcatctcaattagtcagcaaccaggtgtggaaagtccccaggctccccagcaggcagaagtatgcaaagcatgcatctcaattagtcagcaaccatagtcccgcccctaactccgcccatcccgcccctaactccgcccagttccgcccattctccgccccatggctgactaattttttttatttatgcagaggccgaggccgcctctgcctctgagctattccagaagtagtgaggaggcttttttggaggcctagtattaaggaatttggctggttgtttgttgtctttaatggaccgcccgcagggggggtggcatttcagtgtcgggtgacgagcgcgatccggccgggatcctaggaccccaaaagtttgtctgcgtattccagggcggggctcagttgaatctcccgcagcacctctaccagcaggtccgcggtgggctggagaaactcggccgtcccggggcaggcggtcgtcgggggtggaggcgcggcgcccaccccgtgtgccgcgcctggcgtctcctctgggggcgacccgtaaatggttgcagtgatgtaaatggtgtccgcggtccagaccacggtcaaaatgccggccgtggcgctccgggcgctttcgccgcgcgaggagctgacccaggagtcgaacggatacgcgtacatatgggcgtcccacccgcgttcgagcttctggttgctgtcccggcctataaagcggtaggcacaaaattcggcgcgacagtcgataatcaccaacagcccaatgggggtgtgttggataacaacgcctccgcgcggcaggcggtcctggcgctcccggccccgtaccatgatcgcgcgggtgccgtactcaaaaacatgcaccacctgcgcggcgtcgggcagtgcgctggtcagcgaggccctggcgtggcataggctatacgcgatggtcgtctgtggattggacatctcgcggtgggtagtgagtcccccgggccgggttcggtggaactgtaaggggacggcgggttaatatacaatgaccacgttcggatcgcgcagagccgatagtatgtgcttactaatgacgtcatcgcgctcgtggcgctcccggagcggatttaagttcatgcgaaggaattcggaggaggtggtgcgggacatggccacgtacgcgctgttgaggcgcaggttgccgggcgtaaagcagatggcgaccttgtccaggctaaggccctgggagcgcgtgatggtcatggcaagcttggagctgatgccgtagtcggcgtttatggccatggccagctccgtagagtcaatggactcgacaaactcgctgatgttggtgttgacgacggacatgaagccgtgttggtcccgcaagaccacgtaaggcaggggggcctcttccagtaactcggccacgttggccgtcgcgtgccgcctccgcagctcgtccgcaaaggcaaacacccgtgcgtacgtgtatcccatgagcgtataattgtccgtctgcagggcgacggacatcagccccccgcgcggcgagccggtcagcatctcgcagccccggaagataacgttgtccacgtacgtgctaaagggggcgccttcaaatgcctccccaaagagctcttggaggattcggaatctcccgaggaaggcccgcttcagcagcgcaaactgggtgtgaacggcggcggtggtctccggttccccgggggtgtagtggcagtaaaacacgtcgagctgttgttcgtccagccccgcgaaaataacgtcgaggtcgtcgtcgggaaaatcgtccgggcccccgtcccgcggccccagttgcttaaaatcaaacgcacgctcgccgggggcgcctgcgtcggccattaccgacgcctgcgtcggcacccccgaagatttggggcgcagagacagaatctccgccgttagttctcccatgcgggcgtaggcgagggtcctctgggtcgcatccaggcccgggcgctgcagaaagttgtaaaaggagataagcccgctaaatatgagccgcgacaggaacctgtaggcaaactccaccgaagtctccccctgagtctttacaaagctgtcgtcacgcaacactgcctcgaaggcccggaacgtcccactaaacccaaaaaccagttttcgcaggcgcgcggttaccgcgatctggctgttgaggacgtaagtgacgtcgttgcgggccacgaccagctgctgtttgctgtgcacctcgcagcgcatgtgccccgcgtcctggtcctggctctgcgagtagttggtgatgcggctggcgttggccgtgagccacttttcaatagtcaggccgggctggtgtgtcagccgtcggtattcgtcaaactccttgaccgacacgaacgtaagcacggggagggtgaacacgacaaactccccctcacgggtcaccttcaggtaggcgtggagcttggccatgtacgcgctcacctctttgtgggaggagaacaaccgcgtccagccggggaggttggcggggttggtgatgtagttttccgggacgacgaagcgatccacgaactgcatgtgctcctcggtgatgggtaggccgtactccagcaccttcatgaggttaccgaactcgtgctcgatgcaccgtttgttgttaataaaaatggcccagctatacgagaggcgggcgtactcccgcagcgtgcggttgcagatgaggtacgtgagcacgttctcgctctggcggacggaacaccgcagtttctggtgctcgaaggtcgactccagggacgccgtctgtgtcggcgagcccacacacaccaacacgggccgcaggcgggccgcgtactggggggtgtggtacagggcgttaatcatccaccagcaatacaccacggccgtgaggaggtgacgcccaaggagcccggcctcgtcgatgacgatcacgttgctgcgggtaaaggccggcagcgccccgtgggtggccggggccaaccgcgtcagggcgccctcggccaaccccagggtccgttccagggcggccagggcgcgaaactcgttccgcgactcctcgcccccggaggcggccagggtgcgcttcgtgaggtccaaaatcacctcccagtagtacgtcagatctcgtcgctgcaggtcctccagcgaggcggggttgctggtcagggtgtacgggtactgccccagttgggcctggacgtgattcccgcgaaacccaaattcatgaaagatggtgttgatgggtcggctgagaaaggcgcccgagagtttggcgtacatgttttgggccgcaatgcgcgtggcgcccgtcaccacacagtccaagacctcgttgattgtctgcacgcacgtgctctttccggagccagcgttgccggtgataagatacaccgcgaacggaaactccctgaggggcaggcctgcgggggactctaaggccgccacgtcccggaaccactgcagacggggcacttgcgctccgtcgagctgttgttgcgagagctctcggatgcgcttaaggattggctgcaccccgtgcatagacgtaaaatttaaaaaggcctcggccctccctggaacggctggtcggtccccgggttgctgaaggtgcggcgggccgggtctctgtccgtctagctggcgctccccgccggccgccgccatgaccgcaccacgctcgcgggcccccactacgcgtgcgcggggggacacggaagcgctgtgctcccccgaggacggctgggtaaaggttcaccccacccccggtacgatgctgttccgcgagattctccacgggcagctggggtataccgagggccagggggtgtacaacgtcgtccggtccagcgaggcgaccacccggcagctgcaggcggcgatctttcacgcgctcctcaacgccaccacttaccgggacctcgaggcggactggctcggccacgtggcggcccgcggtctgcagccccaacggctggttcgccggtacaggaacgcccgggaggcggatatcgccggggtggccgagcgggtgttcgacacgtggcggaacacgcttaggacgacgctgctggactttgcccacgggttggtcgcctgctttgcgccgggcggcccgagcggcccgtcaagcttccccaaatatatcgactggctgacgtgcctggggttggtccccatattacgcaagcgacaagaagggggtgtgacgcagggtctgagggcgtttctcaagcagcacccgctgacccgccagctggccacggtcgcggaggccgcggagcgcgccggccccgggttttttgagctggcgctggccttcgactccacgcgcgtggcggactacgaccgcgtgtatatttactacaaccaccgccggggcgactggctcgtgcgagaccccatcagcgggcagcgcggagaatgtctggtgctgtggcctcccttgtggaccggggaccgtctggtcttcgattcgcccgtacagcggctgtttcccgagatcgtcgcgtgtcactccctccgggaacacgcgcacgtctgccggctgcgcaataccgcgtccgtcaaggtgctgctggggcgcaagagcgacagcgagcgcggggtggccggcgccgcgcgggtcgttaacaaggtgttgggggaggacgacgagaccaaggccgggtcggccgcctcgcgcctcgtgcggcttatcatcaacatgaagggcatgcgccacgtaggcgacattaacgacactgtgcgtgcctacctcgacgaggccggggggcacctgatagacgccccggccgtcgacggtaccctcccgggattcggcaagggcggaaacagccgcgggtctgcgggccaggaccagggggggcgggcgccgcagcttcgccaggccttccgcacggccgtggttaacaacatcaacggcgtgttggagggctatataaataacctgtttggaaccatcgagcgcctgcgcgagaccaacgcgggcctggcgacccagttgcaggagcgcgaccgcgagctccggcgcgcaacatcgggggccctggagcgccagcagcgcgcggccgacctggcggccgagtccgtgaccgggggatgcggcagccgccctgcgggggcggacctgctccgggccgactatgacattatcgacgtcagcaagtccatggacgacgacacgtacgtcgccaacagttttcagcacccgtacatcccttcgtacgcccaggacctggagcgcctgtcgcgcctctgggagcacgagctggtgcgctgtttcaaaattctgtgtcaccgcaacaaccagggccaagagacgtcgatctcgtactccagcggggcgatcgccgcattcgtcgccccctactttgagtcagtgcttcgggccccccgggtaggcgcgcccatcacgggctccgatgtcatcctgggggaggaggagttatgggatgcggtgtttaagaaaacccgcctgcaaacgtacctgacagacatcgcggccctgttcgtcgcggacgtccagcacgcagcgctgcccccgcccccctccccggtcggcgccgatttccggcccggcgcgtccccgcggggccggtccagatcgcggtcgcccggaagaactgcgcgaggcgcgccggaccagggcgggggcatcgggcaccgggatggccgccgcgacggccgacgatgaggggtcggccgccaccatcctcaagcaggccatcgccggggaccgcagcctggtcgaggcggccgaggcgattagccagcagacgctgctccgcctggcctgcgaggtgcgccaggtcggcgaccgccagccgcggtttaccgccaccagcatcgcgcgcgtcgacgtcgcgcctgggtgccggttgcggttcgttctggacgggagtcccgaggacgcctatgtgacgtcggaggattactttaagcgctgctgcggccagtccagttatcgcggcttcgcggtggcggtcctgacggccaacgaggaccacgtgcacagcctggccgtgccccccctcgttctgctgcaccggttctccctgttcaaccccagggacctcctggactttgagcttgcctgtctgctgatgtacctggagaactgcccccgaagccacgccaccccgtcgacctttgccaaggttctggcgtggctcggggtcgcgggtcgccgcacgtccccattcgaacgcgttcgctgccttttcctccgcagttgccactgggtcctaaacacactcatgttcatggtgcacgtaaaaccgttcgacgacgagttcgtcctgccccactggtacatggcccggtacctgctggccaacaacccgccccccgttctctcggccctgttctgtgccaccccgacaagctcctcattccggctgccggggccgcccccccgctccgactgcgtggcctataaccccgccgggatcatggggagctgctgggcgtcggaggaggtgcgcgcgcctctggtctattggtggctttcggagaccccaaaacgacagacgtcgtcgctgttttatcagttttgttgaattttaggaaataaacccggttttgtttctgtggcctcccgacggatgcgcgtgtccttactccgtcttggtgggtgggtggctgtgtatggcgtcccatctgtgcggggaggggggcaagtcggcacgtattcggacagactcaagcacacacgggggagcgctcttgtctcagggcaatgtttttattggtcaaactcaggcaaacagaaacgacatcttgtcgtcaaagggatacacaaacttccccccctcgccccatactcccgccagcaccccggtaaacaccaactcaatctcgcgcaggatttcgcgcaggtgatgagcgcagtccacgggggggagcacaaggggccgcgggtatagatcgacggggacgccgaccgactccccgcctccgggacagacacgcacgacgcgccgccagtagtgctctgcgtccagcaaggcgccgccgcggaaggcagtggggggcaaggggtcgctggcctcaaagggggacacccgaacgctccagtactccgcgtccaaccgtttattaaacgcgtccaagataaggcggtcgcaggcgtcctccataaggccccgggccgtgagtgcgtcctcctccggcacgcctgccgttgtcaggcccaggacccgtcgcagcgtgtcgcgtacgaccccggccgccgtggtgtacgcgggcccgcggagaggaaatcccccaagatggtcagtgttgtcgcgggagttccagaaccacactcccgcctggctccaggcgactgcgtgggtgtagacgccctcgagggccaggcacagtgggtgccgcagccggaggccgttggccctaagcacggctcccacggccgtctcgatggcccgccgggcgtcctcgatcaccccggaagccgcatccgcgtcttgggggtccacgttaaagacaccccagaacgcacccccatcgcccccgcagaccgcgaacttcaccgagctggccgtctcctcgatctgcaggcagacggcggccattaccccacccaggagctgccgcagcgcagggcaggcgttgcacgtgtccgggaccaggcgctccaagacggccccggcccagggctctgagggagcggccaccaccagcgcgtccagtcttgctaggcccgtccggccgtgggggtccgccagcccgctccccccgaggtcggccagggccgccaggagctgggcgcgaagtccggggaagcaaaaccgcgccgtccagacgggcccgacggccgcgggcgggtctaacagttggatgattttagtggcgggatgccaccgcgccaccgcctcccgcactgcgggcaggaggcatccggctgccgccgaggccacgccgggccaggctcgcggggggaggacgaccctgacccccaccgcgggccaggcccccaggagcgcggcgtaagcggccgcggccccgcgcaccaggtcccgtgccgactcggccgtggccggcacggtgaacgtgggccaacccggaaaccccaggacggcaaagtacgggacgggtcccccccggacctcaaactcgggccccagaaaggcaaagacgggggccagggccccgggggcggcgtggaccgtggtatgccactgccggaaaagggcgacgagcgccggcgcggagaacttctcgccggcgcttacaaagtagtcgtaatcgcggggcagcagcacccgtgccgtgactcgttgcgggtgcccgcgtggccgcaggcccacctcgcacacctcgaccaggtccccgaacgcgccctccttcttgatcggcggaaacgcaagagtctggtattcgcgcgcaaatagcgcggttccggtggtgatgttaacggtcagcgaagcggtggacgcgcactggggggtgtcgcgaatggccgccaggcgcgcccacgccagccgcgcgtcgggatgctcggcaacgcgcgccgccagggccatagggtcgatgtcaatgttggcctccgcgaccaggagagcggcgcgaggggcggcgggcgggccccacgacgctctctcaactttcaccaccagtcccgtgcgtgggtccgagccgatacgcagcggggcgaacagggccaccggcccggtctggcgctccagggccgccaggacgcacgcgtacagcgcccgccacagagtcgggttctccaggggctccagcggggaggcggccggcgtcgtcgcggcgcgggcggccgccacgacggcctggacggagacgtccgcggagccgtagaaatcccgcagctccgtcgcggtgacggagacctccgcaaagcgcgcgcgaccctcccctgcggcgttgcgacatacaaaatacaccagggcgtggaagtactcgcgagcgcgggggggcagccataccgcgtaaagggtaatggcgctgacgctctcctccacccacacgatatctgcggtgtccatcgcacggcccctaaggatcacgggcggtctgtgggtcccatgctgccgtgcctggccgggcccggtgggttgcggaaaccggtgacgggggggggggcggtttttggggttggggtgggaaacggcccgggtccgggggccaacttggcccctcggtgcgttccggcaacagcgccgccggtccgcggacgaccacgtaccgaacgagtgcggtcccgagacttatagggtgctaaagttcaccgccccctgcatcatgggccaggcctcggtggggagctccgacagcgccgcctccaggatgatgtcagcgttggggttggcgctggatgagtgcgtgcgcaaacagcgcccccacgcgggcacgcgtagcttgaagcgcgcgcccgcaaactcccgcttgtgggccataagcagggcgtacagctgcctgtgggtccggcaggcgctgtggtcgatgtggtgggcgtccaacaaccccacgattgtctgtttggtgaggtttttaacgcgccccgccccgggaaacgtctgcgtgcttttggccatctgcacgccaaacagttcgccccagattatcttgaacagcgccaccgcgtggtccgtctcactaacggacccgcgcgggggacagccgcttagggcgtcggcgacgcgcttgacggcttcctccgagagcagaagtccgtcggttacgttacagtggcccagttcgaacaccagctgcatgtagcggtcgtagtggggggtcagcaggtccagcacgtcatcggggccgaaggtcctcccagatcccccggccgccgagtcccaatgcaggcgcgcggccatggtgctgcacaggcacaacagctcccagacaggggttacgttcagggtggggggcagggccacgagctccagctctccggtgacgttgatcgtggggatgacgcccgtggcgtagtggtcatagatccgccgaaatatggcgctgctgcgggtggccatgggaacgcggagacaggcctccagcaacgccaggtaaataaaccgcgtgcgtcccatcaggctgttgaggttgcgcatgagcgcgacaatttccgccggcgcgacatcggaccggaggtatttttcgacgaaaagacccacctcctccgtctcggcggcctgggccggcagcgacgcctcgggatcccggcaccgcagctcccgtagatcgcgctgggccctgagggcgtcgaaatgtacgccccgcaaaaacagacagaagtcctttggggtcagggtatcgtcgtgtccccagaagcgcacgcgtatgcagtttagggtcagcagcatgtgaaggatgttaaggctgtccgagagacacgccagcgtgcatctctcaaagtagtgtttgtaacggaatttgttgtagatgcgcgacccccgccccagcgacgtgtcgcatgccgacgcgtcacagcgccccttgaaccggcgacacagcaggtttgtgacctgggagaactgcgcgggccactggccgcaggaactgaccacgtggttcaggagcatgggcgtaaagacgggctccgagcgcgccccggagccgtccatgtaaatcagtagctcccccttgcggagggtgcgcacccgtcccagggactggtacacggacaccatgtccggtccgtagttcatgggtttcacgtaggcgaacatgccatcaaagtgcaggggatcgaagctgaggcccacggttacgaccgtcgtgtatataaccacgcggtattggccccacgtggtcacgtccccgaggggggtgagcgagtgaagcaacagcacgcggtccgtaaactgacggcagaaccgggccacgatctccgcgaaggagaccgtcgacgaaaaaatgcagatgttatcgcccccgccaaggcgcgcttccagctccccaaagaacgtggccccccgggcgtccggagaggcgtccggagacgggccgctcggcggcccgggcgggcgcagggcagcctgcaggagctcggtccccagacgcgggagaaacaggcaccggcgcgccgaaaacccgggcatggcgtactcgccgaccaccacatgcacgtttttttcgccccggagaccgcacaggaagtccaccaactgcgcgttggcggttgcgtccatggcgatgatccgaggacatgtgcgcagcaggcgtagcattaacgcatccacgcggcccagttgctgcatcgttggcgaatagagctggcccagcgtcgacataacctcgtccagaacgaggacgtcgtagttgttcagaaggttggggcccacgcgatgaaggctttccacctggacgataagtcggtggaaggggcggtcgttcataatgtaattggtggatgagaagtaggtgacaaagtcgaccaggcctgactcagcgaaccgcgtcgccagggtctgggtaaaactccgacgacaggagacgacgagcacactcgtgtccggagagtggatcgcttcccgcagccagcggatcagcgcggtagtttttcccgaccccattggcgcgcggaccacagtcacgcacctggccgtcggggcgctcgcgttggggaaggtgacgggtccgtgctgctgccgctcgatcgttgttttcgggtgaacccggggcacccattcggccaaatcccccccgtataacatccgcgctagcgatacgctcgacgtgtactgttcgcactcgtcgtccccaatgggacgcccggcccccagaggatcccccgactccgcgccccccacgaaaggcatgaccggggcgcggacggcgtggtgggtctggtgtgtgcaggtggcgacgtttgtggtctctgcggtctgcgtcacggggctcctcgtcctggcctctgtgttccgggcacggtttccctgcttttacgccacggcgagctcttatgccggggttaactccacggccgaggtgcgcgggggtgtagccgtgcccctcaggttggacacgcagagccttgtgggcacttatgtaatcacggccgtattgttgttggccgcggccgtgtatgccgtggtcggcgccgtgacctcccgctacgaccgcgccctggacgcgggccgccgtctggctgcggcccgcatggccatgccgcacgccacgctgatcgccggaaacgtctgctcttggttgctgcagatcaccgtcctgctgctggcccatcgcatcagccagctggcccacctggtttacgtcctgcactttgcgtgtctggtgtattttgcggcccatttttgcaccaggggggtcctgagcgggacgtatctgcgtcaggtgcacggcctgatggagctggccccgacccatcatcgcgtcgtcggcccggctcgcgccgtgctgacaaacgccttgctgttgggcgtcttcctgtgcacggccgacgccgcggtatccctgaataccatcgccgcgttcaactttaatttttcggccccgggcatgctcatctgcctgaccgtgctgttcgccattctcgtcgtatcgctgttgttggtggtcgagggggtgttgtgtcactacgtgcgcgtgttggtgggcccccacctgggggccgttgccgccacgggcatcgtcggcctggcctgcgagcactattacaccaacggctactacgtggtggagacgcagtggccgggggcacagacgggagtgcgcgtcgccctcgccctggtcgccgcctttgccctcggcatggccgtgctccgctgcacccgcgcctatctgtatcacaggcggcaccacaccaaattttttatgcgcatgcgcgacacgcgacaccgcgcacattccgccctcaagcgcgtacgcagttccatgcgcggatcgcgagacggccgccacaggcccgcgcccggcagcccgcccgggattcccgaatatgcggaagacccctacgcgatctcatacggcggccagctcgaccggtacggagattccgacggggagccgatttacgacgaggtggcggacgaccaaaccgacgtattgtacgccaagatacaacacccgcggcacctgcccgacgacgagcccatctatgacaccgttggggggtacgaccccgagcccgccgaggaccccgtgtacagcaccgtccgccgttggtagctgtttggttccgttttaataaaccgtttgtgtttaacccgaccgtggtgtatgtctggtgtgtggcgtccgatcccgttactatcaccgtccccccccctcaaccccggcgattgtgggttttttaaaaacgacacgcgtgcgaccgtatacagaacattattttggtttttattcgctatcggacatggggggtggaaactgggtggcggggcaggcgcctccgggggtccgccggtgagtgtggcgcgagggggggtccgacgaacgcaggcgcggtctccccggggcccgcgtaaccacgcgcatatccgggggcacgtagaaattaccttcctcttcggactcgatatccacgacgtcaaagtcgtgggcggtcagcgagacgacctccccgtcgtcggtgatgaggacgttgtttcggcagcagcagggccgggccccggagaacgagaggcccatagctcggcgagcgtgtcgtcgaacgccaggcggctgcttcgctggatggccttatagatctccggatcgatgcggacgggggtaatgatcagggcgatcggaacggcctggttcgggagaatggacgccttgctgggtcctgcggccccgagagccccggcgccgtcctccaggcggaacgttacgccctcctccgcgctggtgcggtgcctgccgataaacgtcaccagatgcgggtggggggggcagtcggggaagtggctgtcgagcacgtagccctgcaccaagatctgcttaaagttcgggtggcgggggttcgcgaagacgggctcgcggcggaccagatccccggagctccaggacacgggggagatggtgtggcgtccgaggtcgggggcgccaaacagaagcacctccgagacaacgccgctatttaactccaccaaggcccgatccgcggcggagcaccgccttttttcgcccgaggcgtgggcctctgaccaggcctggtcttgcgtgacgagagcctcctccgggccggggacgcgcccgggcgcgaagtatcgcacgctgggcttcgggatcgaccggataaatgcccggaacgcctccggggaccggtgtgccatcaagtcctcgtacgcggaggccgtggggtcgctggggtccatggggtcgaaagcgtacttggcccggcatttgacctcgtaaaaggccaggggggtcttggggactggggccaggtagccgtgaatgtcccgaggacagacgagaatatccagggacgccccgaccatccccgtgtgaccgtccatgaggaccccacacgtatgcacgttctcttcggcgaggtcgctgggttcgtggaagataaagcgccgcgtgtcggcgccggcctcgccgccgtcgtccgcgcggcccacgcagtagcgaaacagcaggcttcgggccgtcggctcgttcacccgcccgaacatcaccgccgaagactgtacatccggtcgcaggctggcgttgtgcttcagccactggggcgagaaacacggaccctgggggccccagcggagggtggatgcggtcgtgaggccccgccggagcagggcccatagctggcagtcggcctggttttgcgtggccgcctcgtaaaaccccatgaggggccggggcgccacggcgtccgcggcggccgggggggcgcggcgcgtcaggcgccataggtgccggccgagtccgcggtccaccatacccgcctcctcgaggaccacggccagggaacacagataatccaggcgggcccagaggggaccgatggccagaggggcgcggacgccgcgcagcaacccgcgcaggtggcgctcgaacgtctcggctagtatatgggagggcagcgcgttggggatcaccgacgccgaccacatagagtcaaggtccggggagtcgggatcggcgtccgggtcgcgggcgtgggtgcccccaggagatagcggaatgtccggggtcggaggcccggaggcgtcagaaagtgccggcgacgcggcccggggcttttcgtctgcggtgtcggtggcgtgctgatcacgtggggggttatcgggcgaatgggagctcgggtccacagctgacgtcgtctggggtggggggggcaggggacggaaggtggttgtcagcggaagactgttagggcgggggcgcttgggggggctgtcggggccacgaggggtgtcctcggccagggcccagggacgcttagtcacggtgcgtcccggcggacatgctgggcctaccgtggactccatttccgagacgacgtggggggagcggtggttgagcgcgccgccgggtgaacgctgattctcacgacagcgcgtgccgcgcgcacgggttggtgtgacacaggcgggacaccagcaccaggagaggcttaagctcgggaggcagcgccaccgacgacagtatcgccttgtgtgtgtgctggtaatttatacaccgatccgtaaacgcgcgccgaatcttgggattgcggaggtggcgccggatgccctctgggacgtcatacgccaggccgtgggtgttggtctcggccgagttgacaaacagggctgggtgcagcacgcagcgataggcgagcagggccagggcgaagtccggcgacagctggttgttgaaatactggtaaccgggaaaccgggtcacgggtacgcccaggctcggggcgacgtacacgctaaccaccaactccagcagcgtctggcccagggcgtacaggtcaaccgctagcccgacgtcgtgcttcaggcggtggttggtaaattcggcccgttcgttgttaaggtatttcaccaacagctccgggggctggttatacccgtgacccaccagggtgtgaaagttggctgtggttagggcggtgggcatgccaaacatccggggggacttgaggtccggctcctggaggcaaaactgcccccgggcgatcgtggagttggagttgagggtgacgaggctaaagtcggcgaggacggcccgccggagcgagacggcgtccgaccgcagcatgacgaggatgttggcgcacttgatatccaggtggctgatcccgcaggtggtgtttaaaaacacaacggcacgggccagctccgtgaagcactggtggagggccgtcgagaccgaggggtttgttgtgcgcagggacgccagttggccgatatacttaccgaggtccatgtcgtacgcggggaacactatctgtcgttgttgcagcgagaacccgaggggcgcgatgaagccgcggatgttgtgggtgcggccggcgcgtagagcgcactccccgaccaacagggtcgcgatgagctcaacggcaaaccactccttttcctttatggtcttaacggcaagcttatgttcgcgaatcagttggacttcgccgtatcccccagaccccccgaagcttcgggccccggggatctcgagggtcgtgtagtgtagggcggggttgatggcgaacacggggctgcatagcttgcggatgcgcgtgagggtgaggatgtgcgagggggacgaggggggtgcggttaacgccgcctgggatctgcgcaggggcgggcggttcagtttggccgccgtaccgggcgcctcgggggacgcgcggcgatgagacgagcggctcattcgccatcgggatagtcccgcgcgaagccgctcgcggaggccggatcggtggcggcacccgtgggaggagcgggagacggcggcgttctggagagaggggccgctggggcgcccggaggccccatgggggttggagtgtatgtaggatgcgagccaatccttgaaggaccgttggcgtgcaccttgggggctgaggttagctgccacatgaccagcaggtcgctgtctgcgggactcatccatccttcggccaggtcgccgtctccccacagagaagcgttggtcgctgcctcctcgagttgctcctcctggtccgcaagacgatcgtccacggcgtccaggcgctcaccaagcgccggatcgaggtaccgtcggtgtgcggttagaaagtcacgacgcgccgcttgctcctccacgcgaattttaacacaggtcgcgcgctgtcgcatcatctctaagcgcgcgcgggactttagccgcgcctccaattccaagtgggccgcctttgcagccataaaggcgccaacaaaccgaggatcttgggtgctgacgccctcccggtgcagctgcagggtctggtccttgtaaatctcggctcggaggtgcgtctcggccaggcgtcggcgcagggccgcgtgggcggcatctcggtccattccgccaccctgcgggcgacccgggggtgctctgatagtctcgcgtgcccaaggcccgtgatcggggtacttcgccgccgcgacccgccacccggtgtgcgcgatgtttggtcagcagctggcgtccgacgtccagcagtacctggagcgcctcgagaaacagaggcaacttaaggtgggcgcggacgaggcgtcggcgggcctcacaatgggcggcgatgccctacgagtgccctttttagatttcgcgaccgcgacccccaagcgccaccagaccgtggtcccgggcgtcgggacgctccacgactgctgcgagcactcgccgctcttctcggccgtggcgcggcggctgctgtttaatagcctggtgccggcgcaactaaaggggcgtgatttcgggggcgaccacacggccaagctggaattcctggcccccgagttggtacgggcggtggcgcgactgcggtttaaggagtgcgcgccggcggacgtggtgcctcagcgtaacgcctactatagcgttctgaacacgtttcaggccctccaccgctccgaagcctttcgccagctggtgcactttgtgcgggactttgcccagctgcttaaaacctccttccgggcctccagcctcacggagaccacgggcccccccaaaaaacgggccaaggtggacgtggccacccacggccggacgtacggcacgctggagctgttccaaaaaatgatccttatgcacgccacctactttctggccgccgtgctcctcggggaccacgcggagcaggtcaacacgttcctgcgtctcgtgtttgagatccccctgtttagcgacgcggccgtgcgccacttccgccagcgcgccaccgtgtttctcgtcccccggcgccacggcaagacctggtttctggtgcccctcatcgcgctgtcgctggcctcctttcgggggatcaagatcggctacacggcgcacatccgcaaggcgaccgagccggtgtttgaggagatcgacgcctgcctgcggggctggttcggttcggcccgagtggaccacgttaaaggggaaaccatctccttctcgtttccggacgggtcgcgcagtaccatcgtgtttgcctccagccacaacacaaacgtaagtcctcttttctttcgcatggctctcccaaggggccccgggtcgacccgacccacacccacccacccacatacacacacaaccagacgcgggaggaaagtctgccccgtgggcactgatttttattcgggatcgcttgaggaggcccgggcaacggcccgggcaacggtggggcaactcgtagcaaataggcgactgatgtacgaagagaagacacacaggcgccacccggcgctggtcggggggatgttgtccgcgccgcaccgtcccccgacgacctcttgcagacggtccgtgatgcaaggacggcggggggcctgcagcagggtgaccgtatccacgggatggccaaagagaagcggacacaggctagcatccccctggaccgccagggtacactgggccatcttggcccacagacacggggcgacgcagggacaggactccgttacgacggaggagagccacagtgcgttggcggaatcgatgtggggcggcggggcgcaggactcgcagccccccgggtggttagtgatcctggccaggagccatcccagatggcgggccctgcttcccggtggacagagcgaccccaggtcgctgtccatggcccagcagtagatctggccgctggggaggtgccaccaggcccccgggcccaaggcgcagcacgcgcccggctccgggggggtcttcgcggggaccagatacgcgccatccagctcgccgaccactggctcctccgcgagctgttcggtggttgggtcgggggtttcctccgggggggtggccgcccgtatgcgggcgaacgtgagggtgcacaggagcggggtcagggggtgcgtcacgctccggaggtggacgatcgcgcagtagcggcgctcgcggttaaagaaaaagagggcaaagaaggtgttcgggggcaaccgcagcgccttggggcgcgtcagatacagaaaaatctcgcagaagagggcgcgcccggggtctgggttaggaagggccacctgacacagaggctcggtgaggaccgttagacaccgaaagatcttgagccgctcgtccgcccgaacgacgcgccacacaaagacggagttgacaatgcgcgcgatagagtcgacgtccgtccccaggtcgtcgactctgtcgcgcgtgccgcgagctccggcccgggaatccggccggggcaaggtccccgggggaccaggcggcgccaggggccgccggggtcccagctgcgccatgccgggggcggggggagggcaaaccccagaggcgggggccaacggcgcggggaggagtggatgggcgaggtggccgggggaaggcgcccgctagcgagaacggccgttcccggacgacaccttgcgacaaaacctaaggacagcggcccgcgcgacggggtccgagaggctaaggtaggccgcgatgttaatggtgaacgcaaagccgccgggaaagacaactatgccacagaggcggcgattaaaccccaggcagaggtaggcgtagctttccccgggcaggtattgctcgcagaccctgcgtggggctgtggaggggacggcctccatgaagcgacatttactctgctcgcgtttactgacgtcaccatccatcgccacggcgattggacgattgttaagccgcagcgtgtctccgcttgtgctgtagtagtcaaaaacgtaatggccgtcggagtcggcaaagcgggccgggaggtcgtcgccgagcgggacgacccgccgcccccgaccgccccgtccccccaggtgtgccaggacggccagggcatacgcggtgtgaaaaaaggcgtcgggggcggtcccctcgacggcgcgcatcaggttctcgaggagaatggggaagcgcctggtcacctcccccagccacgcgcgttggtcggggccaaagtcatagcgcaggcgctgtgagattcgcgggccgccctgaagcgcggcccggatggcctggcccagggcccggaggcacgccagatgtatgcgcgcggtaaaggcgacctcggcggcgatgtcaaagggcggcaggacggggcgcgggtggcgcaggggcacctcgagcgcgggaaagcggagcagcagctccgcctgcccagcgggagacagctggtgggggcgcacgacgcgttctgcggcgcaggcctcggtcagggccgtggccagcgccgaggacagcagcggagggcgggcgcgtcgcccgccccacgccactgagttctcgtaggagacgacgacgaagcgctgcttggttccgtagtggtggcgcaggaccacggagatagaacgacggctccacagccagtccggccggtcgccgccggccagggcttcccatccgcgatccaaccactcgaccagcgaccgcggctttgtggtaccaggggtaagggttagaacgtcgttcaggatgtcctcgcccccgggcccgtggggcgctggggccacaaagcggcccccgccggggggctccagacccgccagcaccgcatctgcgtcagccgcccccatggcgcccccgctgacggcctggtgaaccagggcgccctggcggagccccgatgcaacgccacaggccgcacgcccggtccgagcgcggaccgggtggcggcgggtgacgtcctgcactgcccgctgaaccaacgcgaggatctcctcgttctcctgtgcgatggacacgtcctgggccgcggtcgtgtcgccgccgggggccgtcagctgctcctccggggagatgggggggtcggacgccccgacgatgggcgggtctgcgggcgcccccgcgtggggccgggccaagggctgcggacgcggggacgcgctttcccccagacccatggacaggtgggccgcggcctccttcgcggccggcggggcggcggcgccaagcagagcgacgtagcggcacaaatgccgacagacgcgcatgatgcgcgtgctgtcggccgcgtagcgcgtgttgggggggacgagctcgtcgtaactaaacagaatcacgcgggcacagctcgcccccgagccccacgcgaggcgcagcgccgccacggcgtacgggtcatagacgccctgcgcgtcacacaccacgggcagggagacgaacaaccccccggcgctggacgcacgcggaaggaggccagggtgtgccggcacgacgggggccagaagctcccccaccgcatccgcgggcacgtaggcggcaaacgccgtgcaccacggggtacagtcgccggtggcatgagcccgagtctggatttcgacctggaagtttgcggccgtcccgagtccggggcggccgcgcatcagggcggccagagggattcccgcggccgccaggcactcgctggatatgatgacgtgaaccaaagacgagggccgacccgggccgtggccgagatcgtactggacctcgttggccaagtgcgcgttcatggttcggggtgggtgtgggtgtgtaggcgatgcgggtcccccgagtccgcgggaagggcgtgggtttggcgcgcgtatgcgtattcgccaacggaggcgtgcgtgcttatgcgcggcgcgtttcttctgtctccagggaatccgaggccaggactttaacctgctctttgtcgacgaggccaactttattcgcccggatgcggtccagacgattatgggctttctcaaccaggccaactgcaagattatcttcgtgtcgtccaccaacaccgggaaggccagtacgagctttttgtacaacctccgcggggccgccgacgagcttctcaacgtggtgacctatatatgcgatgatcacatgccgagggtggtgacgcacacaaacgccacggcctgttcttgttatatcctcaacaagcccgttttcatcacgatggacggggcggttcgccggaccgccgatttgtttctggccgattccttcatgcaggagatcatcgggggccaggccagggagaccggcgacgaccggcccgttctgaccaagtctgcgggggagcggtttctgttgtaccgcccctcgaccaccaccaacagcggcctcatggcccccgatttgtacgtgtacgtggatcccgcgttcacggccaacacccgagcctccgggaccggcgtcgctgtcgtcgggcggtaccgcgacgattatatcatctttgccctggagcacttttttctccgcgcgctcacgggctcggcccccgccgacatcgcccgctgcgtcgtccacagtctgacgcaggtcctggccttgcatcccggggcgtttcgcggcgtccgggtggcggtcgagggaaatagcagccaggactcggccgtcgccatcgccacgcacgtgcacacagagatgcaccgcctactggcctcggagggggccgacgcgggctcgggccccgagcttctcttctaccactgcgagcctcccgggagcgcggtgctgtacccctttttcctgctcaacaaacagaagacgcccgcctttgaacactttattaaaaagtttaactccgggggcgtcatggcctcccaggagatcgtttccgcgacggtgcgcctgcagaccgacccggtcgagtatctgctcgagcagctgaataacctcaccgaaaccgtctcccccaacactgacgtccgtacgtattccggaaaacggaacggcgcctcggatgaccttatggtcgccgtcattatggccatctaccttgcggcccaggccggacctccgcacacattcgctcccatcacacgcgtttcgtgagcgcccaataaacacacccaggtatgctacgcacgaccacggtgtcgcctgttaaggggggggaagggggtgttggcgggaagcgtgggaacacgggggattctctcacgaccggcaccagtaccacccccctgtgaacacagaaacccaacccaaatcccataaacatacgacacacaggcatattttggaatttcttgggtttttatttatttaggtatgctggggtttctccctggatgcccaccccccacccccccccgtgggtctagccgggccttagggatagcgtataacgggggccatgtctccggaccgcacaacggccgcgccgtcaaaggtgcacacccgaaccacgggagccagggccaaggtgtctcctagttggcccgcgtgggtcagccaggcgacgagcgcctcgtaaagcggcagccttcgctctccatcctgcaccagggccggggcttcggggtgaatgagctgggcggcctcccgcgtgacactctgcatctgcaggagagcgttcacgtacccgtcctgggcacttagcgcaaagagccgggggattagcgtaaggatgatggtggttccctccgtgatcgagtaaaccatgttaaggaccagcgatcgcagctcggcgtttacgggaccgagttgttggacgtccgccagcagcgagaggcgactcccgttgtagtacagcacgttgaggtctggcagccctccggggtttctggggctggggttcaggtcccggatgcccctggccacgagccgcgccacgatttcgcgcgccaggggcgatggaagcggaacgggaaaccgcaacgtgaggtccagcgaatccaggcgcacgtccgtcgcttggccctcgaacacgggcgggacgaggctgatggggtccccgttacagagatctacgggggaggtgttgcgaaggttaacggtgccggcgtgggtgaggcccacgtccaggggacaggcgacgattcgcgtgggaagcacccgggtgatgaccgcggggaagcgccttcggtacgccagcaacaaccccaacgtgtcgggactgacgcctccggagacgaaggattcgtgcgccacgtcggccagcgtcagttgccggcggatggtcggcaggaataccacccgcccttcgcagcgctgcagcgccgccgcatcggggcgcgagatgcccgagggtatcgcgatgtcagtttcaaagccgtccgccagcatggcgccgatccacgcggcagggagtgcagtggtggttcgggtggcgggaggagcgcggtgggggtcagcggcgtagcagagacgggcgaccaacctcgcataggacggggggtgggtcttagggggttgggaggcgacagggaccccagagcatgcgcggggaggtctgtcgggcccagacgcaccgagagcgaatccgtccacggagtcccggtctgggttttatggggcccggccctcggaatcgcggcttgtcggcggggacaaagggggcggggctagggggcttgcggaaacagaagacgcgtgggataaaagaatcgcactaccccaaggaagggcggggcggtttattacagagccagtcccttgagcggggatgcgtcatagacgagatactgcgcgaagtgggtctcccgcgcgtgggcttccccgttgcgggcgctgcggaggagggcggggtcgctggcgcaggtgagcgggtaggcctcctgaaacaggccacacgggtcctccacgagttcgcggcaccccggggggcgcttaaactgtacgtcgctggcggcggtggccgtggacaccgccgaacccgtctccacgatcaggcgctccaggcagcgatgtttggcggcgatgtcggccgacgtaaagaacttaaagcaggggctgagcaccggcgaggccccgttgaggtggtaggccccgttatagagcaggtccccgtacgaaaatcgctgcgacgcccacgggttggccgtggccgcaaaggcccgggacgggtcgctctggccgtggtcgtacatgagggcggtgacatccccctccttgtcccccgcgtaaacgcccccggcggcgcgtccccgggggttgcagggccggcggaagtagttgacgtcggtcgacacgggggtggcgataaactcacacacggcgtcctggccgtggtccatccctgcgcgccgcggcacctgggcgcacccgaacacggggacgggctgggccggccccaggcggtttcccgccacgaccgcgttccgcaggtacacggctgccgcgttgtccaggagagggggagccccgcggcccaggtaaaagttttggggaaggttgcccatgtcggtgacggggttgcggacggttgccgtggccacgacggcggtgtagcccacgcccaggtccacgttcccgcgcggctgggtgagcgtgaagtttacccccccgccagtttcgtgccgggccacctggagctggcccaggaagtacgcctccgacgcgcgctccgagaacagcatgttctcagtcacaaagcggtcctgtcggacgacggtgaacccaaacccgggatggaggcccgtcttgagctgatgatgcaaggccacgggactgatcttgaagtaccccgccatgagcgcgtaggtcagcgcgttctccccggccgcgctctcgcggacgtgctgcacgacgggctgtcggatcgacgaaaagtagttggcccccagagccggggggaccagggggacctgccgcgacaggtcgcgcagggccggggggaaattgggcgcgttcgccacgtggtcggccccggcgaacagcgcgttgacgggaagggggtaaaaatagtcgccattttggatggtatggtccagatgctggggggccatcagcaggattccggcgtgcaacgccccgtcgaatatgcgcatgttggtggtggacgcggtgttggcgcccgcgtcgggcgccgccgagcagagcagcgccgttgtgcgttcggccatgttgtgggccagcacctgcagcgtgagcatggcgggcccgtccactaccacgcgcccgttgtgaaacatggcgttgaccgtgttggccaccagattggccgggtgcagggggtgcgcggggtccgtcacggggtcgctggggcactcctcgccgggggcgatctccgggaccaccatgttctgcagggtggcgtatacgcggtcgaagcgaacccccgcggtgcagcagcggccccgcgagaaggcgggcaccatcacgtagtagtaaatcttgtggtgcacggtccagtccgccccccggtgcggccggtcatccgcggcgtccgcggctcgggcctgggtgttgtgcagcagctggccgtcgttgcggttgaagtccgcggtcgccacgttacatgccgccgcgtacacggggtcgtggccccccgcgctaacccggcagtcgcgatggcggtccagggccgcgcgccgcatcagggcgtcacagtcccacacgaggggtggcagcagcgccgggtctcgcattaggtgattcagctcggcttgcgcctgcccgcccagctccgggccggtcagggtaaagtcatcaaccagctgggccagggcctcgacgtgcgccaccaggtcccggtacacggccatgcactcctcgggaaggtctcccccgaggtaggtcacgacgtacgagaccagcgagtagtcgttcacgaacgccgcgcaccgcgtgttgttccagtagctggtgatgcactggacaacgagccgggccagggcgcagaagacgtgctcgctgccgtgtatggcggcctgcagcaggtaaaacaccgccgggtagttgcggtcgtcgaacgccccgcgaacggcggcgatggtggcgggggccatggcgtggcgtcccacccccagctccaggccccgggcgtcccggaacgccgccggacatagcgccaggggcaagttgccgttcaccacgcgccaggtggcctggatctcccccgggccggccgggggaacgtccccccccggcagctccacgtcggccacccccacgaagaagtcgaacgcggggtgcagctcaagagccaggttggcgttgtcgggctgcataaactgctccggggtcatctggccttccgcgacccatcggacccgcccgtgggccaggcgctgcccccaggcgttcaaaaacagctgctgcatgtctgcggcggggccggccggggccgccacgtacgccccgtacggattggcggcttcgacggggtcgcggttaaggcccccgaccgccgcgtcaacgttcatcagcgaagggtggcacacggtcccgatcgcgtgttccagagacaggcgcagcacctggcggtccttcccccaaaaaaacagctggcggggcgggaaggcgcggggatccgggtggccgggggcggggactaggtccccggcgtgcgcggcaaaccgttccatgaccggattgaacaggcccaggggcaggacgaacgtcaggtccatggcgcccaccagggggtagggaacgttggtggcggcgtagatgcgcttctccagggcctccagaaagaccagcttctcgccgatggacaccagatccgcgcgcacgcgcgtcgtctggggggcgctctcgagctcgtccagcgtctgccggttcaggtcgagctgctcctcctgcatctccagcaggtggcggcccacgtcgtccagacttcgcacggccttgcccatcacgagcgccgtgaccaggttggccccgttcaggaccatctcgccgtacgtcaccggcacgtcggcttcggtgtcctccactttcaggaaggactgcaggaggcgctgtttgatcggggctgtggtgactagcaccccgtcgaccggccgcccgcgcgtgtcggcatgcgtcagacggggcacggccacggagggctgcgtggccgtggtgaggtccacgagccaggcctcgacggcctcccggcggtggcccgccttgcccaggaaaaagctcgtctcgcagaagcttcgctttagctcggcgaccagggtcgcccgggccaccctggtggccaggcggccgttgtccaggtatcgttgcatcggcaacaacaaagccaggggcggcgccttttccagcagcacgtgcagcatctggtcggccgtgccgcgctcaaacgccccgaggacggcctggacgttgcgagcgagctgttggatggcgcgcaactggcgatgcgcgctgatacccgtcccgtccagggcctcccccgtgagcagggcgatggcctcggtggccaggctgaaggcggcgttcagggcccggcggtcgataatcttggtcatgtaattgtgtgtgggttgctcgatggggtgcgggccgtcgcgggcaatcagcggctggtggacctcgaactgtacgcgcccctcgttcatgtaggccagctccggaaacttggtacacacgcacgccaccgacaacccgagctccagaaagcgcacgagcgacagggtgttgcaatacgaccccagcagggcgtcgaactcgacgtcgtacaggctgtttgcatcggagcgcacgcgggaaaaaaaatcgaacaggcgtcgatgcgacgccacctcgatcgtgctaaggagggacccggtcggcaccatggccgcggcataccggtatcccggagggtcgcggttgggagcggccatggggtcgcgtggagatcggctgtctctagcgatattggcccggggaggctaagatccaccccaacgcccggccacccgtgtacgtgcccgacggcccaaggtccaccgaaagacacgacggacccggacccaaagaggcgggggatgctgtgtgagaggccgggtgtcggtcgggggggaaaggcaccgggagaaggctgcggcctcgttccaggagaacccagtgtccccaacagacccggggacgtgggatccccggccttatatacccccccccgccccacccccgttagaacgcgacgggtgcattcaagatggccctggtccaaaagcgtgccaggaagaaattggcagaggcggcaaagctgtccgccgccgccacccacatcgaggccccggccgcacaggctatccccagggcccgtgtgcgcaggggatcggtgggtggcagcatttggttggtggcgataaagtggaaaagcccgtccggactgaaggtctcgtgggcggcggcgaacaaggcacacagggccgtgcctcccaaaaacacggacatcccccaaaacacgggcgccgacaacggcagacgatccctcttgatgttaacgtacaggaggagcgcccgcaccgcccacgtaacgtagtagccgacgatggcggccaggatacaggccggcgccaccacccttccggtcagcccgtaatacatgcccgctgccaccatctccaacggcttcaggaccaaaaacgaccaaaggaacagaatcacgcgctttgaaaagaccggctgggtatggggcggaagacgcgagtatgccgaactgacaaaaaaatcagaggtgccgtacgaggacaatgaaaactgttcctccagcggcagttctccctcctcccccccgaaggcggcctcgtcgaccagatctcgatccaccagaggaaggtcatcccgcatggtcatggggtgtgcggtggaggtggggagaccgaaaccgcaaagggtcgcttacgtcagcaggatcccgagatcaaagacacccgggttcttgcacaaacaccacccgggttgcatccgcggaggcgagtgttttgataaggccgttccgcgccttgatataacctttgatgttgaccacaaaacccggaatttacgcctacgccccaatgcccacgcaagatgaggtaggtaacccccccgtgggtgtgacgttgcgtttagttcattggaggccaaggggaaaaatggggtggggaggaaacggaaaacccagtaggccgtgtcgggaacacgcccggggttgtcctcaaaaggcagggtccatactacggaagccgtcgttgtattcgagacctgcctgtgcgacgcacgtcggggttgcctgtgtccggttcggcccccaccgcgtgcggcacgcacgaggacgagtccgcgtgctttattggcgttccaagcgttgccctccagtttctgttgtcggtgttcccccatacccacgcccacatccaccgtagggggcctctgggccgtgttacgtcgccgcccgcgatggagcttagctacgccaccaccatgcactaccgggacgttgtgttttacgtcacaacggaccgaaaccgggcctactttgtgtgcggggggtgtgtttattccgtggggcggccgtgtgcctcgcagcccggggagattgccaagtttggtctggtcgttcgagggacaggcccagacgaccgcgtggtcgccaactatgtacgaagcgaactccgacaacgcggcctgcaggacgtgcgtcccattggggaggacgaggtgtttctggacagcgtgtgtcttctaaacccgaacgtgagctccgagctggatgtgattaacacgaacgacgtggaagtgctggacgaatgtctggccgagtactgcacctcgctgcgaaccagcccgggtgtgctaatatccgggctgcgcgtgcgggcgcaagacagaatcatcgagttgtttgaacacccaacgatagtcaacgtttcctcgcactttgtgtataccccgtccccatacgtgttcgccctggcccaggcgcacctcccccggctcccgagctcgctggaggccctggtgagcggcctgtttgacggcatccccgccccacgccagccacttgacgcccacaacccgcgcacggatgtggttatcacgggccgccgcgccccacgacccatcgccgggtcgggggcggggtcggggggcgcgggcgccaagcgggccaccgtcagcgagttcgtgcaagtcaaacacattgaccgcgtgggccccgctggcgtttcgccggcgcctccgccaaacaacaccgactcgagttccctggtgcccggggcccaggattccgccccgcccggccccacgctaagggagctgtggtgggtgttttatgccgcagaccgggcgctggaggagccccgcgccgactctggcctcacccgcgaggaggtacgtgccgtacgtgggttccgggagcaggcgtggaaactgtttggctccgcgggggccccgcgggcgtttatcggggccgcgttgggcctgagccccctccaaaagctggccgtttactactatatcatccaccgagagaggcgcctgtcccccttccccgcgctagtccggctcgtaggccggtacacacagcgccacggcctgtacgtccctcggcccgacgacccagtcttggccgatgccatcaacgggctggttcgcgacgcgctggcggccggaaccacagccgagcagctcctcatgttcgaccttctccccccaaaggacgtgccggtgggaagcgacgtgcaggccgacagcaccgctctgctgcgctttatagaatcgcaacgtctcgccgtccccgggggggtgatctcccccgagcacgtcgcgtaccttggtgcgttcctgagcgtgctgtacgctggccgcgggcgcatgtccgcagcaacgcacaccgcgcggctgacaggggtgacctccctggtgctagcggtgggtgacgtggaccgtctttccgcgtttgaccgcggagcggcgggcgcggccagccgcacgcgggccgccgggtacctggatgtgcttcttaccgttcgtctcgctcgctccaaacacggacagtctgtgtaacagaccccaataaacgtatgtcgctaccacacccttgtgtgtcaatggacgcctctccgggggggaagggaaaacaaagaggggctgggggagcggcaccactggggcctgaacaaacaaacaaaccacagacacggttacagtttattcggtcgggcggataaacggccgaagccacgccccctttattcgcgtctccaaaaaaacgggacacttgtccggagaacctttaggatgccagccagggcggcggtaatcataaccacgcccagcgcagaggcggccagaaacccgggcgcaattgcggccacgggctgcgtgtcaaaggctagcaaatgaatgacggttccgtttggaaatagcaacaaggccgtggacggcacgtcgctcgaaaacacgctcggggcgccctccgtcggcccggcggcgatttgctgctgtgtgttgtccgtatccaccagcaacacagacatgacctccccggctggggtgtagcgcataaacacggcccccacgagccccaggtcgcgctggttttgggtgcgcaccagccgcttggactcgatatcccgggtggagccttcgcatgtcgcggtgaggtaggttaggaacagtgggcgtcggacgtcgacgccggtgagcttgtagccgatcccccggggcagaggggagtgggtgacgacgtagctggcgttgtgggtgatgggtaccaggatccgtggctcgacgttggcagactgccccccgcaccgatgtgaggcctcagggacgaaggcgcggatcagggcgttgtagtgtgcccagcgcgtcagggtcgaggcgaggccgtgggtctgctgggccaggacttcgaccggggtctcggatcgggtggcttgagccagcgcgtccaggataaacacgctctcgtctagatcaaagcgcagggaggccgcgcatggcgaaaagtggtccggaagccaaaagagggttttctggtggtcggcccgggccagcgcggtccggaggtcggcgttggtcgctgcggcgacgtcggacgtacacagggccgatgctatcagaaggctccggcgggcgcgttcccgctgcaccgccgaggggacgcccgccaagaacggctgccggaggacagccgaggcgtaaaatagcgcccggtggacgaccggggtggtcagcacgcggccccctagaaactcggcatacagggcgtcgatgagatgggctgcgctgggcgccactgcgtcgtacgccgaggggctatccagcacgaaggccagctgatagcccagcgcgtgtaatgccaagctctgttcgcgctccagaatctcggccaccaggtgctggagccgagcctctagctgcaggcgggccgtgggatccaagactgacacattaaaaaacacagaatccgcggcacagcccgcggccccgcgggcggccaacccggcaagcgcgcgcgagtgggccaaaaagcctagcaggtcggagaggcagaccgcgccgtttgcgtgggcggcgttcacgaaagcaaaacccgacgtcgcgagcagccccgttaggcgccagaagagaggggggcgcgggccctgctcggcgcccgcgtcccccgagaaaaactccgcgtatgcccgcgacaggaactgggcgtagttcgtgccctcctccgggtagccgcccacgcggcggagggcgtccagcgcggagccgttgtcggcccgcgtcagggaccctaggacaaagacccgataccgggggccgcccgggggcccgggaagagcccccggggggttttcgtccgcggggtccccgacccgatctagcgtctggcccgcggggaccaccatcacttccaccggagggctgtcgtgcatggatatcacgagccccatgaattcccgcccgtagcgcgcgcgcaccagcgcggcatcgcacccgagcaccagctcccccgtcgtccagatgcccacgggccacgtcgaggccgacggggagaaatacacgtacctacctggggatctcaacaggccccgggtggccaaccaggtcgtggacgcgttgtgcaggtgcgtgatgtccagctccgtcgtcgggtgccgccgggccccaaccggcggtcgggggggcggtgtatcacgcggcccgcttgggtggctcgccgtcgccacgttgtctccccgcgggaacgtcagggcctcggggtcagggacggccgaaaacgttacccaggcccgggaacgcagcaacacggaggcgactggattgtacaagagacccttaaggggggcgaccgaggggggaggctgggcggtcggctcgaccgtggtgggggcgggcaggctcgcgttcgggggccggccgagcaggtaggtcttcgggatgtaaagcagctggccggggtcccgcggaaactcggccgtggtgaccaatacaaaacaaaagcgctcctcgtaccagcgaagaaggggcagagatgccgtagtcaggtttagttcgtccggcggcgccagaaatccgcgcggtggtttttgggggtcgggggtgtttggcagccacagacgcccggtgttcgtgtcgcgccagtacatgcggtccatgcccaggccatccaaaaaccatgggtctgtctgctcagtccagtcgtggacctgaccccacgcaacgcccaaaataataacccccacgaaccataaaccattccccatgggggaccccgtccctaacccacggggcccgtggctatggcagggcttgccgccccgacgttggctgcgagccctgggccttcacccgaacttggggggtggggtggggaaaaggaagaaacgcgggcgtattggccccaatggggtctcggtggggtatcgacagagtgccagccctgggaccgaaccccgcgtttatgaacaaacgacccaacacccgtgcgttttattctgtctttttattgccgtcatagcgcgggttccttccggtattgtctccttccgtgtttcagttagcctcccccatctcccgggcaaacgtgcgcgccaggtcgcagatcgtcggtatggagccgggggtggtgacgtgggtctggaccatcccggaggtaagttgcagcagggcgtcccggcagccggcgggcgattggtcgtaatccaggataaagacgtgcatgggacggaggcgtttggccaagacgtccaaggcccaggcaaacacgttgtacaggtcgccgttgggggccagcaactcgggggcccgaaacagggtaaataacgtgtccccgatatggggtcgtgggcccgcgttgctctggggctcggcaccctggggcggcacggccgtccccgaaagctgtccccaatcctcccgccacgacccgccgccctgcagataccgcaccgtattggcaagcagcccgtaaacgcggcgaatcgcggccagcatagccaggtcaagccgctcgccggggcgctggcgtttggccaggcggtcgatgtgtctgtcctccggaagggcccccaacacgatgtttgtgccgggcaaggtcggcgggatgagggccacgaacgccagcacggcctggggggtcatgctgcccataaggtatcgcgcggccgggtagcacaggagggcggcgatgggatggcggtcgaagatgagggtgagggccgggggcggggcatgtgagctcccagcctcccccccgatatgaggagccagaacggcgtcggtcacggcataaggcatgcccattgttatctgggcgcttgtcattaccaccgccgcgtccccggccgatatctcaccctggtcgaggcggtgttgtgtggtgtagatgttcgcgattgtctcggaagcccccagcacctgccagtaagtcatcggctcgggtacgtagacgatatcgtcgcgcgaacccagggccaccagcagttgcgtggtggtggttttccccatcccgtgaggaccgtctatataaacccgcagtagcgtgggcattttctgctccaggcggacttccgtggcttcttgctgccggcgagggcgcaacgccgtacgtcggttgctatggccgcgagaacgcgcagcctggtcgaacgcagacgcgtgttgatggcaggggtacgaagccatacgcgcttctacaaggcgcttgccgaagaggtgcgggagtttcacgccaccaagatctgcggcacgctgttgacgctgttaagcgggtcgctgcagggtcgctcggtgttcgaggccacacgcgtcaccttaatatgcgaagtggacctgggaccgcgccgccccgactgcatctgcgtgttcgaattcgccaatgacaagacgctgggcggggtttgtgtcatcatagaactaaagacatgcaaatatatttcttccggggacaccgccagcaaacgcgagcaacgggccacggggatgaagcagctgcgccactccctgaagctcctgcagtccctcgcgcctccgggtgacaagatagtgtacctgtgccccgtcctggtgtttgtcgcccaacggacgctccgcgtcagccgcgtgacccggctcgtcccgcagaaggtctccggtaatatcaccgcagtcgtgcggatgctccagagcctgtccacgtatacggtccccatggagcctaggacccagcgagcccgtcgccgccgcggcggcgccgcccgggggtctgcgagcagaccgaaaaggtcacactctggggcgcgcgacccgcccgagtcagcggcccgccagttaccacccgccgaccaaacccccgcctccacggagggcgggggggtgcttaagaggatcgcggcgctcttctgcgtgcccgtggccaccaagaccaaaccccgagccgcctccgaatgagagtgtttcgttccttccccctccccccgcgtcagacaaaccctaaccaccgcttaagcggcccccgcgaggtccgaagactcatttggatccggcgggagccacccgacaacagcccccgggttttcccacgccagacgccggtccgctgtgccatcgcgccccctcatcccaccccccatcttgtccccaaataaaacaaggtctggtagttaggacaacgaccgcagttctcgtgtgttattttcgctctccgcctctcgcagatggacccgtactgcccatttgacgctctggacgtctgggaacacaggcgcttcatagtcgccgattcccgaaacttcatcacccccgagttcccccgggacttttggatgtcgcccgtctttaacctcccccgggagacggcggcggagcaggtggtcgtcctacaggcccagcgcacagcggctgccgctgccctggagaacgccgccatgcaggcggccgagctccccgtcgatatcgagcgccggttacgcccgatcgaacggaacgtgcacaagatcgcaggcgccctggaggcgctggagacggcggcggccgccgccgaagaggcggatgccgcgcgcggggatgagccggcgggtgggggcgacgggggggcgcccccgagtctggccgtcgcggagatggaggtccagatcgtgcgcaacgacccgccgctacgatacgacaccaacctccccgtggatctgctacacatggtgtacgcgggccgcggggcgaccggatcgtcgggggtggtgttcgggacctggtaccgcactatccaggaccgcaccatcacggactttcccctgaccacccgcagtgccgactttcgggacggccgtatgtccaagaccttcatgacggcgctggtactgtccctgcagtcgtgcggccggctgtatgtgggccagcgccactattccgccttcgagtgcgccgtgttgtgtctctacctgctgtaccgaaacacgcacggggccgccgacgatagcgaccgcgctccggtcacgttcggggatctgctgggccggctgccccgctacctggcgtgcctggccgcggtgatcgggaccgagggcggccggccacagtaccgctaccgcgacgacaagctccccaagacgcagttcgcggccggcgggggccgctacgaacacggagcgctggcgtcgcacatcgtgatcgccacgctgatgcaccacggggtgctcccggcggccccgggggacgtcccccgggacgcgagcacccacgttaaccccgacggcgtggcgcaccacgacgacataaaccgcgccgccgccgcgttcctcagccggggccacaacctattcctgtgggaggaccagactctgctgcgggcaaccgcgaacaccataacggccctgggcgttatccagcggctcctcgcgaacggcaacgtgtacgcggaccgcctcaacaaccgcctgcagctgggcatgctgatccccggagccgtcccttcggaggccatcgcccgtggggcctccgggtccgactcgggggccatcaagagcggagacaacaatctggaggcgctatgtgccaattacgtgcttccgctgtaccgggccgacccggcggtcgagctgacccagctgtttcccggcctggccgccctgtgtcttgacgcccaggcggggcggccggtcgggtcgacgcggcgggtggtggatatgtcatcgggggcccgccaggcggcgctggtgcgcctcaccgccctggaactcatcaaccgcacccgcacaaaccccacccccgtgggggaggttatccacgcccacgacgccctggcgatccaatacgaacaggggcttggcctgctggcgcagcaggcacgcattggcttgggctccaacaccaagcgtttctccgcgttcaacgttagcagcgactacgacatgttgtactttttatgtctggggttcattccacagtacctgtcggcggtttagtgggtggtgggcgaggggggagggggcattagggagaaagaacaagagcctccgttgggttttctttgtgcctgtactcaaaaggtcataccccgtaaacggcgggctccagtcccggcccggcggttggcgtgaacgcaacggcgggagctgggttagcgtttagtttagcattcgctctcgcctttccgcccgccccccgaccgttgcgccttttttttttttcgtccaccaaagtctctgtgggtgcgcgcatggcagccgatgccccgggagaccggatggaggagcccctgccagacagggccgtgcccatttacgtggctgggtttttggccctgtatgacagcggggactcgggcgagttggcattggatccggatacggtgcgtgcggccctgcctccggataacccactcccgattaacgtggaccaccgcgctggctgcgaggtggggcgggtgctggccgtggtcgacgacccccgcgggccgttttttgtgggactgatcgcctgcgtgcaactggagcgcgtcctcgagacggccgccagcgctgcgattttcgagcgccgcgggccgccgctctcccgggaggagcgcctgttgtacctgatcaccaactacctgccctcggtctccctggccacaaaacgcctggggggcgaggcgcaccccgatcgcacgctgttcgcgcacgtcgcgctgtgcgcgatcgggcggcgcctcggcactatcgtcacctacgacaccggtctcgacgccgccatcgcgccctttcgccacctgtcgccggcgtctcgcgagggggcgcggcgactggccgccgaggccgagctcgcgctgtccggacgcacctgggcgcccggcgtggaggcgctgacccacacgctgctttccaccgccgttaacaacatgatgctgcgggaccgctggagcctggtggccgagcggcggcggcaggccgggatcgccggacacacctacctccaggcgagcgaaaaattcaaaatgtggggggcggagcctgtttccgcgccggcgcgcgggtataagaacggggccccggagtccacggacataccgcccggctcgatcgctgccgcgccgcagggtgaccggtgcccaatcgtccgtcagcgcggggtcgcctcgcccccggtactgccccccatgaaccccgttccggcatcgggcaccccggcccccgcgccgcccggcgacgggagctacctgtggatcccggcctcccattacaaccagctcgtcgccggccacgccgcgccccaaccccagccgcattccgcgtttggtttcccggctgcggcgggggccgtggcctatgggcctcacggcgcgggtctttcccagcattaccctccccacgtcgcccatcagtatcccggggtgctgttctcgggacccagcccactcgaggcgcagatagccgcgttggtgggggccatagccgcggaccgccaggcgggcggtcagacggccgcgggagaccctggggtccgggggtcgggaaagcgtcgccggtacgaggcggggccgtcggagtcctactgcgaccaggacgaaccggacgcggactacccgtactaccccggggaggctcgaggcgggccgcgcggggtcgactctcggcgcgcggcccgccagtctcccgggaccaacgagaccatcacggcgctgatgggggcggtgacgtctctgcagcaggaactggcgcacatgcgggctcggaccagcgccccctatggaatgtacacgccggtggcgcactatcgccctcaggtgggggagccggaaccaacaacgacccacccggccctttgtcccccggaggccgtgtatcgccccccaccacacagcgccccctacggtcctccccagggtccggcgtcccatgcccccactcccccgtatgccccagctgcctgcccgccaggcccgccaccgcccccatgtccttccacccagacgcgcgcccctctaccgacggagcccgcgttcccccccgccgccaccggatcccaaccggaggcatccaacgcggaggccggggcccttgtcaacgccagcagcgcagcacacgtggacgttgacacggcccgcgccgccgatttgttcgtctctcagatgatgggggcccgctgattcgccccggtctttggtaccatgggatgtcttactgtatatctttttaaataaaccaggtaataccaaataagacccattggtgtatgttctttttttattgggaggcgcgggtaggcgggtagctttacaatgcaaaagccttcgacgtggaggaaggcgtggggggggaatcggcactgaccaagggggtccgttttgtcacgggaaaggaaagaggaaacaggccgcggacacccgggggagtttatgtgttcccttttctttcttcccacacacacaaaaggcgtaccaaacaaacaaaccaaaagatgcacatgcggtttaacacccgtggtttttatttacaacaaaccccccgtcacaggtcgtcctcgtcggcgtcaccgtctttgttgggaacttgggtgtagttggtgttgcggcgcttgcgcatgaccatgtcggtgaccttggcgctgagcagcgcgctcgtgcccttcttcttggccttgtgttccgtgcgctccatggcagacaccagggccatgtaccgtatcatctcccgggcctcggctagcttggcctcgtcaaagtcgccgccctcctcgccctccccggacgcgtccgggttggtggggttcttgagctccttggtggttagcgggtacagggccttcatggggttgctctgcagccgcatgacgtagcgaaaggcgaagaaagccgccgccaggccggccaggaccaacagacccacggccagcgccccaaaggggttggacatgaaggaggacacgcccgacacggccgataccacgccgcccacgatgcccatcaccaccttgccgaccgcgcgccccaggtcgcccatcccctcgaagaacgcgcccaggcccgcgaacatggcggcgttggcgtcggcgtggatgaccgtgtcgatgtcggcgaagcgcaggtcgtgcagctggttgcggcgctggacctccgtgtagtccagcaggccgctgtccttgatctcgtggcgggtgtacacctccagggggacaaactcgtgatcctccagcatggtgatgttgaggtcgatgaaggtgctgacggtggtgatgtcggcgcggctcagctggtgggagtacgcgtactcctcgaagtacacgtagcccccgccgaaggtgaagtagcgccggtgtcccacggtgcacggctcgatcgcatcgcgcgtcagccgcagctcgttgttctcccccagctgcccctcgaccaacgggccctggtcttcgtaccgaaagctgaccagggggcggctgtagcaggccccgggccgcgagctgatgcgcatcgagttttggacgatcacgttgtccgcggcgaccggcacgcacgtggagacggccatcacgtcgccgagcatccgcgcgctcacccgccggcccacggtggccgaggcgatggcgttggggttcagcttgcgggcctcgttccacagggtcagctcgtgattctgcagctcgcaccacgcgatggcaacgcggcccaacatatcgttgacatggcgctgtatgtggttgtacgtaaactgcagccgggcgaactcgatggaggaggtggtcttgatgcgctccacggacgcgttggcgctggccccgggcggcgggggcgtggggtttgggggcttgcggctctgctctcggaggtgttcccgcacgtacagctccgcgagcgtgttgctgagaaggggctggtacgcgatcagaaagcccccattggccaggtagtactgcggctggcccaccttgatgtgcgtcgcgttgtacctgcgggcgaagatgcggtccatggcgtcgcgggcgtccttgccgatgcagtcccccaggtccacgcgcgagagcgggtactcggtcaggttggtggtgaaggtggtggatatggcgtcggaggagaatcggaaggagccgccgtactcggagcgcagcatctcgtccacctcctgccacttggtcatggtgcagaccgacgggcgctttggcacccagtcccaggccacggtgaacttgggggtcgtgagcaggttccgggtggtcggcgccgtggcccgggccttggtggtgaggtcgcgcgcgtagaagccgtcaacctgcttgaagcggtcggcggcgtagctggtgtgttcggtgtgcgacccctcccggtagccgtaaaacggggacatgtacacaaagtcgccagtcgccagcacaaactcgtcgtacgggtacaccgagcgcgcgtccacctcctcgacgatgcagtttaccgtcgtcccgtaccggtggaacgcctccacccgcgaggggttgtacttgaggtcggtggtgtgccagccccggctcgtgcgggtcgcggcgttggccggtttcagctccatgtcggtctcgtggtcgtcccggtgaaacgcggtggtctccaggttgttgcgcacgtacttggccgtggaccgacagacccccttggcgttgatcttgtcgatcacctcctcgaaggggacgggggcgcggtcctcaaagatccccataaactgggagtagcggtggccgaaccacacctgcgaaacggtgacgtctttgtagtacatggtggccttgaacttgtacggggcgatgttctccttgaagaccaccgcgatgccctccgtgtagttctgaccctcgggccgggtcgggcagcggcgcggctgctcgaactgcaccaccgtggcgcccgtggggggtgggcacacgtaaaagtttgcatcggtgttctccgccttgatgtcccgcaggtgctcgcgcagggtggcgtggcccgcggcgacggtcgcgttgtcgccggcggggcgcggcggcggtgggtttttcggttttttgttcttcttcggtttcgtgtcccccgttggggcggggccaggggcgggcggcgccggagtggcaggtcccccgttcgccgcctgggtcgcggccgcgaccccaggcgtgccgggggaactcggagccgccgacgccaccaggacccccagcgtcaaccccaagagcgcccatacgacgaaccaccggcacccccgcgcgggggcgccctggcgcatggcgggactacgggggcccgtcgtgccccccgtcaggtagcctgggggcgaggtgctggaggaccgagtagaggatcgagaaaacgtctcggtcgtagaccacgaccgaccgggggccgatacagccgtcgggggcgctctcgacgatggccaccagcggacagtcggagtcgtacgtgagatatacgccgggcgggtaacggtaacgaccttcggaggtcgggcggctgcagtccgggcggcgcaactcgagctccccgcaccggtagaccgaggcaaagagtgtggtggcgataatcagctcgcgaatatatcgccaggcggcgcgctgagtgggcgttattccggaaatgccgtcaaaacagtaaaacctctgaaattcgctgacggcccaatcagcacccgagccccccgcccccatgatgaaccgggcgagctcctccttcaggtgcggcaggagccccacgttctcgacgctgtaatacagcgcggtgttggggggctgggcgaagctgtgggtggagtgatcaaagaggggcccgttgacgagctcgaagaagcgatgggtgatgctggggagcagggccgggtccacctggtgtcgcaggagagacgctcgcatgaaccggtgcgcgtcgaacacgcccggcgccgagcggttgtcgatgaccgtgcccgcgcccgccgtcagggcgcagaagcgcgcgcgcgccgcaaagccgttggcgaccgcggcgaacgtcgcgggcagcacctcgccgtggacgctgacccgcagcatcttctcgagctccccgcgctgctcgcggacgcagcgccccaggctggccaacgaccgcttcgtcaggcggtccgcgtacagccgccgtcgctcccgcacgtccgcggccgcttgcgtggcgatgtccccccacgtctcgggcccctgccccccgggcccgcggcgacggtcttcgtcctcgcccccgcccccgggagctcccaacccccgtgccccttcctctacggcgacacggtccccgtcgtcgtcggggcccgcgccgcccttgggcgcgtccgccgcgccccccgcccccatgcgcgccagcacgcgacgcagcgcctcctcgtcgcactgttcggggctgacgaggcgccgcaagagcggcgtcgtcaggtggtggtcgtagcacgcgcggatgagcgcctcgatctgatcgtcgggtgacgtggcctgaccgccgattattagggcgtccaccatatccagcgccgccaggtggctcccgaacgcgcgatcgaaatgctccgcccgccgcccgaacagcgccagttccacggccaccgcggcggtctcctgctgcaactcgcgccgcgccagcgcggtcaggttgctggcaaacgcgtccatggtggtctggccggcgcggtcgccggacgcgagccagaatcgcaattcgctgatggcgtacaggccgggcgtggtggcctgaaacacgtcgtgcgcctccagcagggcgtcggcctccttgcggaccgagtcgttctcgggcgacgggtggggctgcccgtcgccccccgcggtccgggccagcgcatggtccaacacggagagcgcccgcgcgcggtcggcgtccgacagcccggcggcgtggggcaggtaccgccgcagctcgttggcgtccagccgcacctgcgcctgctgggtgacgtggttacagatacggtccgccaggcggcgggcgatcgtcgccccctggttcgccgtcacacacagttcctcgaaacagaccgcgcaggggtgggacgggtcgctaagctccggggggacgataaggcccgaccccaccgcccccaccataaactcccgaacgcgctccagcgcggcggtggcgccgcgcgagggggtgatgaggtggcagtagtttagctgctttagaaagttctcgacgtcgtgcaggaaacacagctccatatggacggtcccgccatacgtatccagcctgacccgttggtgatacggacagggtcgggccaggcccatggtctccgtgaaaaacaccgcgacgtctcccgcggtcgcgaacgtctccaggctgcccaggagccgctcgccctcgcgccacgcgtactctagcagcaactccagggtgaccgacagcggggtgagaaaggccccggcctgggcctccaggcccggcctcagacgacgccgcagcgcccgcacctgaagcgcgttcagcttcagttgggggagcttcccccgtccgatgtgggggtcgcaccgccggagcagctctatctgaaacacataggtctgcacctgtccgagcagggctaacaacttttgacgggccacggtgggctcggacaccggggcggccatctcgcggcgccgatctgtaccgcggccggagtatgcggtggaccgaggcggtccgtacgctacccggcgtctggctgagccccggggtccccctattcggggcggcctcccgcgggcccgccgaccggcaagccgggagtcggcggcgcgtgcgtttctgttctattcccagacaccgcggagaggaatcacggcccgcccagagatatagacacggaacacaaacaagcacggatgtcgtagcaataatttattttacacacattccccgccccgccctaggttcccccaccccccaacccctcacagcatatccaacgtcaggtctccctttttgtcggggggcccctccccaaacgggtcatccccgtggaacgcccgtttgcggccggcaaatgccggtcccggggcccccgggccgccgaacggcgtcgcgttgtcgtcctcgcagccaaaatccccaaagttaaacacctccccggcgttgccgagttggctgactagggcctcggcctcgtgcgccacctccagggccgcgtccgtcgaccactcgccgttgccgcgctccagggcacgtgcggtcagctccatcatctcctcgcttaggtactcgtcctccaggagcgccagccagtcctcgatctgcagctgttgggtgcggggccccaggcttttcacggtcgccacgaacacgctactggcgacggccgccccgccctcggagataatgccccggagctgctcgcacagcgagctttcgtgcgctccgccgccgaggctcgaggccgcgcacacaaacccggcccggggacaggccaggacgaacttgcgggtgcggtcaaaaataaggagcgggcacgcgtttttgccgcccatcaggctggcccagttcccggcctgaaacacacggtcgttgccggccatgccgtagtatttgctgatgctcaaccccaacacgaccatggggcgtgccgccatgacgggccgcagcaggttgcagctggcgaacatggaggtccacgcgcccggatgcgcgtccacggcgtccatcagcgcgcgggccccggcctccaggcccgccccgccctgcgcggaccacgcggccgccgcctgcacgctggggggacggcgggaccccgcgatgatggccgtgagggtgttgatgaagtacgtcgagtgatcgcagtaccgcagaatctggtttgccatgtagtacatcgccagctcgctcacgttgttgggggccaggttaataaagttgatcgcgccgtagtccagggaaaactttttaatgaacgcgatggtctcgatgtcctcgcgcgacaggagccgggcgggaagctggttgcgttggagggccgtccagaaccactgcgggttcggctggttggaccccgggggcttgccgttggggaagatggccgcgtggaactgcttcagcagaaagcccagcggtccgaggaggatgtccacgcgcttgtcgggcttctggtaggcgctctggaggctggcgacccgcgccttggcggcctcggacgcgttggcgctcgcgcccgcgaacaacacgcggctcttgacgcgcagctccttgggaaaccccagggtcacgcgggcaacgtcgccctcgaagctgctctcggcgggggccgtctggccggccgtcaggctgggggcgcagatagccgcaccctccgagagcgcgaccgtcagcgttttggccgacagaaacccgttgttaaacatgtccatcacgcgccgccgcagcaccggttggaattgattgcgaaagttgcgcccctcgaccgactgcccggcgaacaccccgtggcactggctcagggccaggtcctggtacacggcgaggttggatcgccgcccgagaagctgaagcagggggcacggcccgcacgcgtacgggtccagcgtcagggacatggcgtggttggcctcgcccagaccgtcgcgaaacttgaagttcctcccctccaccaggttgcgcatcagctgctccacctcgcggtccacgacctgcctgacgttgttcaccaccgtatgcagggcctcgcggttggtgatgatggtctccagccgccccatggccgtggggaccgcctggtccacgtactgcagggtctcgagttcggccatgacgcgctcggtcgccgcgcggtacgtctcctgcatgatggtccgggcggtctcggatccgtccgcgcgcttcagggccgagaaggcggcgtagtttcccagcacgtcgcagtcgctgtacatgctgttcatggtcccgaagacgccgatggctccgcgggcggcgctggcgaacttgggatggcgcgcccggaggcgcatgagcgtcgtgtgtacgcaggcgtggcgcgtgtcgaaggtgcacaggttacagggcacgtcggtctggttggagtccgcgacgtatcgaaacacgtccatctcctggcgcccgacgatcacgccgccgtcgcagcgctccaggtaaaacagcatcttggccagcagcgccggggaaaacccacacagcatggccaggtgctcgccggcaaattcctgggttccgccgacgaggggcgcggtgggccgaccctcgaacccgggcaccacgtgtccctcgcggtccacctgtgggttggccgccacgtgggtcccgggcacgaggaagaagcggtaaaaggagggtttgctgtggtcctttgggtccgccgggccggcgtcgtccacctcggtgagatggagggccgagttggtgctaaataccatggcccccacgagtcccgcggcgcgcgccaggtacgccccgacggcgttggcgcgggccgcggccgtgtcctggccctcgaacagcggccacgcggagatgtcggtgggcggctcgtcaaagacggccatcgacacgatagactcgagggccagggcggcgtctccggccatgacggaggccaggcgctgttcgaacccgcccgcagggcccttgccgccgccgtcgcgcccgccccgcggggtcttaccctggctggcttcgaaggccgtgaacgtaatgtcggcggggagggcggcgccctcgtggttttcgtcaaacgccaggtgggcggccgcgcgggccacggcgtccacgtttcggcatcgcagtgccacggcggcgggtcccacgaccgcctcgaacaggaggcggtggagggggcggttaaaaaacggaagcgggtaggtaaaattctccccgatcgatcggtggttggcgttgaacggctctgcgatgacacggctaaaatccggcatgaacagctgcaacgggtacacgggtatgcggtgcacctccgccccgcctatggttaccttgtccgagcctcccaggtgcagaaaggtgttgttgatgcacacggcctccttgaagccctcggtaacgaccagatacaggagggcgcggtccgggtccaggccgaggcgctcacacagcgcctcccccgtcgtctcgtgtttgaggtcgccgggccggggggtgtagtccgaaaagccaaaatggcggcgtgcccgctcgcagagtcgcgtcaggttcggggcctgggtgctggggtccaggtgccggccgccgtgaaagacgtacacggacgagctgtagtgcgagggcgtcagtttcagggacaccgcggtacccccgagccccgtcgtgcgagaacccacgaccacggccacgttggcctcaaagccgctctccacggtcaggcccacgaccaggggcgccacggcgacgtcggcatcgccgctgcgcgccgacagtaacgccagaagctcgatgccttcggacggacacgcgcgagcgtacacgtatcccaggggcccgggggggaccttgatggtggttgccgtcttgggctttgtctccatgtccttctgtcaatcggtccgcgaacggaggtaatcccggcacgacgacggacgcccgacaaggtatgtctcccgagcgtcaaaatccgggggggggggcggcgacggtcaaggggagggttggagaccggggttggggaatgaatccctacccttcaccgacaaccccccgggtaatcacggggtgccgatgaaccccggcggccggcaacgcggggtccctgcgagaggcacagatgcttacggtcaggtgctccgggtcgggtgcgtctggtatgcggttggtatatgtacactttacctgggggcgtgcctggccgccccagcccctcccacgccctgcgcgtcatcagccggtgggcgtggccgctattataaaaaaagtgagaacgcgaagcgttcgcactttgtcctaataatatatatattattaggacaaagtgcgaacgcttcgcgttctcactttttttataatagcggccacgcccaccggctacgtcacgctcctgtcggccgccggcggtccataagcccggccggccgggccgacgcgaataaaccgggccgccggccggggcgccgcgcagcagctcgccgcccggatccgccagacaaacaaggcccttgcacatgccggcccgggcgagcctgggggtccggtaattttgccatcccacccaagcggctttttgggtttttctcttcccccctccccacatcccccctctttaggggttcgggtggtaacaaccgcgatgttttccggtggcggcggcccgctgtcccccggaggaaagtcggcggccagggcggcgtccgggttttttgcgcccgccggccctcgcggagccggccggggacccccgccttgcttgaggcaaaacttttacaacccctacctcgccccagtcgggacgcaacagaagccgaccgggccaacccagcgccatacgtactatagcgaatgcgatgaatttcgattcatcgccccgcgggtgctggacgaggatgcccccccggagaagcgcgccggggtgcacgacggtcacctcaagcgcgcccccaaggtgtactgcgggggggacgagcgcgacgtcctccgcgtcgggtcgggcggcttctggccgcggcgctcgcgcctgtggggcggcgtggaccacgccccggcggggttcaaccccaccgtcaccgtctttcacgtgtacgacatcctggagaacgtggagcacgcgtacggcatgcgcgcggcccagttccacgcgcggtttatggacgccatcacaccgacggggaccgtcatcacgctcctgggcctgactccggaaggccaccgggtggccgttcacgtttacggcacgcggcagtacttttacatgaacaaggaggaggtcgacaggcacctacaatgccgcgccccacgagatctctgcgagcgcatggccgcggccctgcgcgagtccccgggcgcgtcgttccgcggcatttccgcggaccacttcgaggcggaggtggtggagcgcaccgacgtgtactactacgagacgcgccccgctctgttttaccgcgtctacgtccgaagcgggcgcgtgctgtcgtacctgtgcgacaacttctgcccggccatcaagaagtacgagggtggggtcgacgccaccacccggttcatcctggacaaccccgggttcgtcaccttcggctggtaccgtctcaaaccgggccggaacaacacgctagcccagccgcgggccccgatggccttcgggacatccagcgacgtcgagtttaactgtacggcggacaacctggccatcgaggggggcatgagcgacctaccggcatacaagctcatgtgcttcgatatcgaatgcaaggcggggggggaggacgagctggcctttccggtggccgggcacccggaggacctggtcatccagatatcctgtctgctctacgacctgtccaccaccgccctggagcacgtcctcctgttttcgctcggttcctgcgacctccccgaatcccacctgaacgagctggcggccaggggcctgcccacgcccgtggttctggaattcgacagcgaattcgagatgctgttggccttcatgacccttgtgaaacagtacggccccgagttcgtgaccgggtacaacatcatcaacttcgactggcccttcttgctggccaagctgacggacatttacaaggtccccctggacgggtacggccgcatgaacggccggggcgtgtttcgcgtgtgggacataggccagagccacttccagaagcgcagcaagataaaggtgaacggcatggtgaacatcgacatgtacgggattataaccgacaagatcaagctctcgagctacaagctcaacgccgtggccgaagccgtcctgaaggacaagaagaaggacctgagctatcgcgacatccccgcctactacgccgccgggcccgcgcaacgcggggtgatcggcgagtactgcatacaggattccctgctggtgggccagctgttttttaagtttttgccccatctggagctctcggccgtcgcgcgcttggcgggtattaacatcacccgcaccatctacgacggccagcagatccgcgtctttacgtgcctgctgcgcctggccgaccagaagggctttattctgccggacacccaggggcgatttaggggcgccgggggggaggcgcccaagcgtccggccgcagcccgggaggacgaggagcggccagaggaggagggggaggacgaggacgaacgcgaggagggcgggggcgagcgggagccggagggcgcgcgggagaccgccggccggcacgtggggtaccagggggccagggtccttgaccccacttccgggtttcatgtgaaccccgtggtggtgttcgactttgccagcctgtaccccagcatcatccaggcccacaacctgtgcttcagcacgctctccctgagggccgacgcagtggcgcacctggaggcgggcaaggactacctggagatcgaggtgggggggcgacggctgttcttcgtcaaggctcacgtgcgagagagcctcctcagcatcctcctgcgggactggctcgccatgcgaaagcagatccgctcgcggattccccagagcagccccgaggaggccgtgctcctggacaagcagcaggccgccatcaaggtcgtgtgtaactcggtttacgggttcacgggagtgcagcacggactcctgccgtgcctgcacgttgccgcgacggtgacgaccatcggccgcgagatgctgctcgcgacccgcgagtacgtccacgcgcgctgggcggccttcgaacagctcctggccgatttcccggaggcggccgacatgcgcgcccccgggccctattccatgcgcatcatctacggggacacggactccatctttgtgctgtgccgcggcctcacggccgccgggctgacggccgtgggcgacaagatggcgagccacatctcgcgcgcgctgtttctgtcccccatcaaactcgagtgcgaaaagacgttcaccaagctgctgctgatcgccaagaaaaagtacatcggcgtcatctacgggggtaagatgctcatcaagggcgtggatctggtgcgcaaaaacaactgcgcgtttatcaaccgcacctccagggccctggtcgacctgctgttttacgacgataccgtatccggagcggccgccgcgttagccgagcgccccgcagaggagtggctggcgcgacccctgcccgagggactgcaggcgttcggggccgtcctcgtagacgcccatcggcgcatcaccgacccggagagggacatccaggactttgtcctcaccgccgaactgagcagacacccgcgcgcgtacaccaacaagcgcctggcccacctgacggtgtattacaagctcatggcccgccgcgcgcaggtcccgtccatcaaggaccggatcccgtacgtgatcgtggcccagacccgcgaggtagaggagacggtcgcgcggctggccgccctccgcgagctcgacgccgccgccccaggggacgagcccgccccccccgcggccctgccctccccggccaagcgcccccgggagacgccgttgcatgccgaccccccgggaggcgcgtccaagccccgcaagctgctggtgtccgagctggccgaggatcccgcatacgccattgcccacggcgtcgccctgaacacggactattacttctcccacctgttgggggcggcgtgcgtgacattcaaggccctgtttgggaataacgccaagatcaccgagagtctgttaaaaaggtttattcccgaagtgtggcaccccccggacgacgtggccgcgcggctccgggccgcagggttcggggcggtgggtgccggcgctacggcggaggaaactcgtcgaatgttgcatagagcctttgatactctagcatgagccccccgtcgaagctgatgtccctcattttacaataaatgtctgcggccgacacggtcggaatctccgcgtccgtgggtttctctgcgttgcgccggaccacgagcacaaacgtgctctgccacacgtgggcgacgaaccggtaccccgggcacgcggtgagcatccggtctatgagccggtagtgcaggtgggcggacgtgccgggaaagatgacgtacagcatgtggcccccgtaagtggggtccgggtaaaacaacagccgcgggtcgcacgccccgcctccgcgcaggatcgtgtggacgaaaaaaagctcgggttggccaagaatcccggccaagaggtcctggaggggggcgttgtggcggtcggccaacacgaccaaggaggccaggaaggcgcgatgctcgaatatcgtgttgatctgctgcacgaaggccaggattagggcctcgcggctggtggcggcgaaccgcccgtctcccgcgttgcacgcgggacagcaacccccgatgcctaggtagtagcccatcccggagagggtcaggcagttgtcggccacggtctggtccagacagaagggcagcgagacgggagtggtcttcaccaggggcaccgagagcgagcgcacgatggcgatctcctcggagggcgtctgggcgagggcggcgaaaaggccccgatagcgctggcgctcgtgtaaacacagctcctgtttgcgggcgtgaggcggcaggctcttccgggaggcccgacgcaccacgcccagagtcccgccggccgcagaggagcgcgaccgccggcgctccttgccgtgatagggcccgggccgggagccgcggcgatgggggtcggtgtcatacataggtacacagggtgtgctccagggacaggagcgagatcgagtggcgtctaagcagcgcgcccgcctcacggacaaatgtggcgagcgcggtgggctttggtacaaatacctgatacgtcttgaaggtgtagatgagggcacgcaacgctatgcagacacgcccctcgaactcgttcccgcaggccagcttggccttgtggagcagcagctcgtcgggatgggtggcggggggatggccgaacagaacccaggggtcaacctccatctccgtaatggcgcacatggggtcacagaacatgtgcttaaagatggcctcgggccccgcggcccgaagcaggctcacaaaccggcccccgtccccgggctgcgtctcggggtcagcctcgagctggtcgacgacgggtacgatacagtcgaagaggctcgtgttgttttccgagtagcggaccacggaggcccggagtctgcgcagggccagccagtaagcacgcaccagtaacaggttacacagcaggcattctccgccggtgcgcccgcgcccccggccgtgtttcagcacggtggccatcagagggcccaggtcgaggtcgggctgggcatcgggttcggtaaactgcgcaaagcgcggagccacgtcgcgcgtgcgtgccccgcgatgcgcttcccaggactggcggaccgtggcgcgacgggcctccgcggcagcgcgcagctggggccccgactcccagacggcgggggtgccggcgaggagcagcaggaccagatccgcgtacgcccacgtatccggcgactcctccggctcgcggtccccggcgaccgtctcgaattccccgttgcgagcggcggcgcgcgtacagcagctgtccccgcccccgcgccgaccctccgtgcagtccaggagacgggcgcaatccttccagttcatcagcgcggtggtgagcgacggctgcgtgccggatcccgccgaccccgccccctcctcgcccccggaggccaaggttccgatgagggcccgggtggcagactgcgccaggaacgagtagttggagtactgcaccttggcggctcccggggagggcgagggcttgggttgcttctgggcatgccgcccgggcaccccgccgtcggtacggaagcagcagtggagaaaaaagtgccggtggatgtcgtttatggtgagggcaaagcgtgcgaaggagccgaccagggtcgccttcttggtgcgcagaaagtggcggtccatgacgtacacaaactcgaacgcggccacgaagatgctagcggcgcagtggggcgcccccaggcatttggcacagagaaacgcgtaatcggccacccactgaggcgagaggcggtaggtttgcttgtacagctcgatggtgcggcagaccagacagggccggtccagcgcgaaggtgtcgatggccgccgcggaaaagggcccggtgtccaaaagcccctccccacagggatccgggggcgggttgcggggtcctccgcgcccgcccgaaccccctccgtcgcccgcccccccgcgggcccttgagggggcggtgaccacgtcggcggcgacgtcctcgtcgagcgtaccgacgggcggcacacctatcacgtgactggccgtcaggagctcggcgcagagagcctcgttaagagccaggaggctgggatcgaaggccacatacgcgcgctcgaacgcccccgccttccagctgctgccgggggactcttcgcacaccgcgacgctcgccaggaccccggggggcgaagttgccatggctgggcgggaggggcgcacgcgccagcgaactttacgggacacaatccccgactgcgcgctgcggtcccagaccctggagagtctagacgcgcgctacgtctcgcgagacggcgcgcatgacgcggccgtctggttcgaggatatgacccccgccgagctggaggttgtcttcccgactacggacgccaagctgaactacctgtcgcggacgcagcggctggcctccctcctgacgtacgccgggcctataaaagcgcccgacgacgccgccgccccgcagaccccggacaccgcgtgtgtgcacggcgagctgctcgcccgcaagcgggaaagattcgcggcggtcattaaccggttcctggacctgcaccagattctgcggggctgacgcgcgtgctgttgggcgggacggttcgcgaaccctttggtgggtttacgcgggcacgcacgctcccatcgcgggcgccatggcgggactgggcaagccctacaccggccacccaggtgacgccttcgagggtctcgttcagcgaattcggcttatcgtcccatctacgttgcggggcggggacggggaggcgggcccctactctccctccagcctcccctccaggtgcgcctttcagtttcatggccatgacgggtccgacgagtcgtttcccatcgagtatgtactgcggcttatgaacgactgggccgaggtcccgtgcaacccttacctgcgcatacagaacaccggcgtgtcggtgctgtttcaggggttttttcatcgcccacacaacgcccccgggggcgcgattacgccagagcggaccaatgtgatcctggggtccaccgagacgacggggttgtccctcggcgacctggacaccatcaaggggcggctcggcctggatgcccggccgatgatggccagcatgtggatcagctgctttgtgcgcatgccccgcgtgcagctcgcgtttcggttcatgggccccgaagatgccggacggacgagacggatcctgtgccgcgccgccgagcaggctattacccgtcgccgccgaacccggcggtcccgggaggcgtacggggccgaggccgggctgggggtggccggaacgggtttccgggccaggggggacggttttggcccgctccccttgttaacccaagggccctcccgcccgtggcaccaggccctgcggggtcttaagcacctacggattggcccccccgcgctcgttttggcggcgggactcgtcctgggggccgctatttggtgggtggttggtgctggcgcgcgcctataaaaaaggacgcaccgccgccctaatcgccagtgcgttccggacgccttcgccccacacagccctcccgaccgacacccccatatcgcttcccgacctccggtcccgatggccgtcccgcaatttcaccgccccagcaccgttaccaccgatagcgtccgggcgcttggcatgcgcgggctcgtcttggccaccaataactctcagtttatcatggataacaaccacccacacccccagggcacccaaggggccgtgcgggagtttctccgcggtcaggcggcggcactgacggaccttggtctggcccacgcaaacaacacgtttaccccgcagcctatgttcgcgggcgacgcaccggccgcctggttgcggcccgcgtttggcctgcggcgcacctattcaccttttgtcgttcgagaaccttcgacgcccgggaccccgtgaggcccagggagttccttctggggtgttttaatcaataaaagaccacaccaacgcacgagccttgcgtttaatgtcgtgtttattcaagggagtgggatagggttcgacggttcgaaacttaacacaccaaataatcgagcgcgtctagcccagtaacatgcgcacgtgatgtaggctggtcagcacggcgtcgctgtgatgaagcagcgcccggcgggtccgctgtaactgctgttgtaggcggtaacaggcgcggatcagcaccgccagggcgctacgaccggtgcgttgcacgtagcgtcgcgacagaactgcgtttgccgatacgggcggggggccgaattgtaagcgcgtcacctcttgggagtcatcggcggataacgcactgaatggttcgttggttatgggggagtgtggttccccagggagtgggtcgagcgcctcggcctcggaatccgagaggaacaacgaggtggcgtcggagtcttcgtcgtcagagacatacagggtctgaagcagcgacacgggcgggggggtagcgtcgatgtgtagcgcgagggaggatgcccacgaagacaccccagacaaggagctgcccgtgcgtggatttgtggaagacgcggaagccgggacggatgggcggttttgcggtgcccggaaccgaaccgccggatactccccgggtgctacatgcccgttttggggctggggttggggctggggttggggctggggttggggctggggttggggctggggttggggctggggttggggttggggttggggctggggttggggttggggctggggctggggctggggctggggctggggctggggctggggctggggctggggctggggctggggctggggctggggctggggctggggctggggttggggcgcggacaggcggctgacggtcaaatgcccccgggggcgcgcagatgtggtgggcgtggccaccggctgccgtgtagtggggcggcgggaaaccgggcctccgggcgtaacaccgccctccagcgtcaagtatgtggggggcgggcctgacgtcgggggcggggtgacgggttggaccgcgggaggcgggggagagggacctgcgggagaggatgaggtcggctcggccgggttgcggcctaaaacaggggccgtggggtcggcggggtcccagggtgaagggagggattcccgcgattcggacagcgacgcgacagcggggcgcgtaaggcgccgctgcggcccgcctacgggaaccctggggggggttggcgcgggacccgaggttagcggggggcggcggttttcgcccccgggcaaaaccgtgccggttgcgaccgggggcggaacgggatcgatagggagagcgggagaagcctggccggcggactggggaccgagcgggaggggcacaccagacaccaaagcgtggggcgctggctctgggggtttgggaggggccggggggcgcgcgaaatcggtaaccggggcgaccgtgtcggggagggcaggcggccgccaaccctgggtggtcgcggaagcctgggtggcgcgcgccagggagcgtgcccggcggtgtcggcgcgcgcgcgacccggacgaagaagcggtagaagcgcgggaggaggcgggggggcggggggcggtggcatcggggggcgccggggaactttggggggacggcaagcgccggaagtcgtcgcgggggcccacgggcgccggccgcgtgctttcggccgggacgcccggtcgtgcttcgcgagccgtgactgccggcccagggggccgcggtgcacactgggacgtggggacggactgatcggcggtgggcgaaagggggtccggggcaaggaggggcgcggggccgccggagtcgtcagacgcgagctcctccaggccgtgaatccatgcccacatgcgaggggggacgggctcgccgggggtggcgtcggtgaatagcgtgggggccaggcttccgggccccaacgagccctccgccccaacaaggtccgccgggccgggggtcgggttcgggaccgaggggctctggtcgtcgggggcgcgctggtacaccggatgccccgggaatagctcccccgacaggagggaggcgtcgaacggccgcccgaggatagctcgcgcgaggaaggggtcctcgtcggtggcgctcgcggcgaggacgtcctcgccgcccgccacaaacgggagctcctcggtggcctcgctgccaacaaaccgcatgtcgggggggccgggggggtccgggttttcccacaacaccgcgaccggggtcatggagatgtccacgagcaccaggcacggcgggccccgggcgaggggccgctcggcgatgagcgcggacaggcgcgggagctgtgccgccagacacgcgttttcgatcgggttaaggtcggcgtgcaggaggcggacggcccacgtctcgatgtcggacgacacggcatcgcgcaaggcggcgtccggcccgcgagcgcgtgagtcaaacagcgtgaggcacagctccagttccgactcgcgggaaaaggccgtggtgttgcggagcgccacgacgacgggcgcgcccaggagcactgccgccagcaccaggtccatggccgtaacgcgcgccgcgggggtgcggtgggtggcggcggccggcacggcgacgtgctggcccgtgggccggtagagggcgttggggggagcggggggtgacgcctcgcgcccccccgaggggctcagcgtctgcccagattccagacgcgcggtcagaagggcgtcgaaactgtcatactctgtgtagtcgtccggaaacatgcaggtccaaagagcggccagcgcggtgcttgggagacacatgcgcccgaggacgctcaccgccgccagcgcctgggcgggactcagctttcccagcgcggcgccgcgctcggttcccagctcggggaccgagcgccagggcgccagggggtcggtttcggacaacttgccgcggcgccagtctgccagccgcgtgccgaacatgaggccccgggtcggagggcctccggccgaaaacgctggcagcacgcggatgcgggcgtctggatgcggggtcaggcgctgcacgaatagcatggaatctgctgcgttctgaaacgcacgggggagggtgagatgcatgtactcgtgttggcggaccagatccaggcgccaaaaggtgtaaatgtgttccggggagctggccaccagcgccaccagcacgtcgttctcgttaaaggaaacgcggtgcctagtggagctctggggtccgagcggcggccccggggccgccgcgtcacccccccattccagctgggcccagcgacacccaaactcgcgcgtgagagtggtcgcgacgagggcgacgtagagctcggccgccgcatccatcgaggccccccatctcgcctggcggtggcgcacaaagcgtccgaagagctgaaagttggcggcctgggcgtcgctgagggccagctgaagccggttgatgacggtgaggacgtacatggccgtgacggtcgaggccgactccagggtgtccgtcggaagcggggggcgaatgcatgccgcctcgggacacatcagcagcgcgccgagcttgtcggtcacggccgggaagcagagcgcgtactgcagtggcgttccatccgggaccaaaaagctgggggcgaacggcctatccagcgtactggtggcctcgcgcagcaccaggggccccgggcctccgctcactcgcaggtacgcctcgccccggcggcgcagcatctgcgggtcggcctcttggccgggtggggcggacgcccgggcgcgggcgtctagggcgcgaagatccacgagcaggggcgcgggcgcggccgccgcgcccgcgcccgtctggcctgtggccttggcgtacgcgctatataagcccatgcggcgttggatgagctcccgcgcgccccggaactcctccaccgcccatggggccaggtccccggccaccgcgtccaattccgccaacaggccccccagggtgtcaaagttcatctcccaggccacccttggcaccacctcgtcccgcagccgggcgctcaggtcggcgtgttgggccacgcgccccccgagctcctccacggccccggcccgctcggcgctcttggcgcccaggacgccctggtacttggcgggaaggcgctcgtagtcccgctgggctcgcagccccgacacagtgttggtggtgtcctgcagggcgcgaagctgctcgcatgccgcgcgaaatccctcgggcgatttccaggcccccccgcgaacgcggccgaagcgaccccatacctcgtcccactccgcctcggcctcctcgaaagacctccgcagggcctcgacgcggcgacgggtgtcgaagagcgactgcaggcgcgcgccctgtcgcgtcaggaggcccgggccgtcgccgctggccgcgcttagcgggtgcgtctcaaaggtgcgctgggcatgttccaaccaggcgaccgcctgcacgtcgagctcgcgcgccttctccgtctggtccaacagaatctcgacctgatccgcgatctcctccgccgagcgcgcctggtccagcgtcttggccacggtcgccgggacggcaaccaccttcagcagggtcttcagattggccagaccctcggcctcgagctgggcccggcgctcgcgcgcggccagcacctcccgcaaccccgccgtgacccgctcggtggcttcggcgcgctgctgtttggcgcgcaccacggcgtccttggtatcggccaggtcctgtcgggtcacgaatgcgacgtagtcggcgtacgccgtgtccttcacggggctctggtccacgcgctccagcgccgccacacacgccaccagcgcgtcctcgctcgggcagggcagggtgacccctgcccggacaagctcggcggccgccgccgggtcgttgcgcaccgcggatatctcctccgcggcggcggccaggtccagcgccacgcttccgatcgcgcgccgcgcgtcggcccggagggcgtccaggcgatcgcggatatccacgtactcggcgtagcccttttgaaaaaacggcacgtactggcgcagggccggcacgccccccaagtcttccgacaggtgtaggacggcctcgtggtagtcgataaacccgtcgttcgcctgggcccgctccagcagcccccccgcgagccgcagaagccgcgccaggggctcggtgtccacccgaaacatgtcggcgtacgtgtcggccgcggccccgaaggccgcgctccagtcgatgcggtgaatggctgcgagcggggggagcatggggtggcgctggttctcgggggtgtatgggttaaacgcaagggccgtctccagggcaagggtcaccgccttggcgttggttcccagcgcctgctcggcccgctttcggaagtcccgggggttgtagccgtgcgtgcccgccagcgcctgcaggcgacggagctcgaccacgtcaaactcggcaccgctttccacgcggtccagcacggcctccacgtcggcggcccagcgctcgtggctactgcgggcgcgctgggccgccatcttctctctgaggtcggcggtggcggcctcaagttcgtcggcgcggcgtcgcgtggcgccgatgacctttcccagctcctgcagggcgcgcccgctgggggagtggtccccggccgtcccttcggcgtgcaacaggcccccgaacctgccctcgtggcccgcgaggctttcccgcgcgccggtggtcgcgcgcgtcgcggcctggatcagggaggcatgctctccctccggttggttggcggcccggcgcacctggacgacaaggtcggcggcagccgaccctaaggtcgtgagctgggcgatggccccccgcgcgtccagggccaaccgagtcgccttgacgtatcccgcggcgctgtcggccatggccgctaggaaggccaggggggaggccgggtcgctggcggccgcgcccagggccgtcactgcgtcgaccaggacgcggtgcgcccgcacggccgcatccaccgtcgacgcggggtctgccgtcgcgacggcggcgctgccggcgttgatggcgttcgagacggcgtgggctatgatcggggcgtgatcggcgaagaactgcaagagaaacggagtctcgggggcgttggcgaacaggttcttcagcaccaccacgaagctgggatgcaagccggacagagccgtcgccgtgtccggagtcgggtgctccagggcatctcggtactgccccagcagcccccacatgtccgcccgcagcgccgccgtaacctccgggggcgccccccgaacggcctcggggaggtccgaccagcccgccggcagggaggcccgcagggtcgtcaggacggccggacaggcctttagccccacaaagtcagggaggggccgcaggaccccctggagtttgtgcaagaacttctcccgggcgtcgcgggccaccttcgcccgctcccgcgctccctcgagcattgcctccagggagcgcgcgcgctcccgcaaacgggcacgcgcatcgggggcgagctctgccgtcagcttggcggcatccatggcccgcgcctgccgcagcgcttcctcggccatgcgcgtggcctctggcgacagcccgccgtcgtcggggtagggcgacgcgccgggcgcaggaacaaaggccgcgtcgctgtccagctgctggcccagggccgcatctagggcgtcgaagcgccgcagctcggccagacccgagctgcggcgcgcctgctggtcgttaatgtcgcggatgctgcgcgccagctcgtccagcggcttgcgttctatcagcccttggttggcggcgtccgtcaggacggagagccaggccgccaggtcctcgggggcgtccagcgtctggccccgctgtatcagatcccgcaacaggatggccgtggggctggtcgcgatcgggggcggggcgggaatggcggcgctctgcgcgatgtcccgcgtgtgctggtcgaagacaggcagggactctagcagctggaccacgggcacgacggcggccgaagccacgtgaaaccggcggtcgttgttgtcgctggcctgcagagccttggcgctgtatacggccccccggtaaaagtactccttaaccgcgccctcgatcgcccgacgggcctgggtccgcacctcctccagccgaacctgaacggcctcggggcccagggggggtgggcgcggagccccctgcggggccgccccggccggggcgggcattacgccgaggggcccggcgtgctgtgagaccgcgtcgaccccgcgagcgagggcgtcgagggcctcgcgcatctggcgatcctccgcctccaccctaatctcttcgccacgggcaaatttggccagagcctggactctatacagaagcggttctgggtgcgtcggggtggcgggggcaaaaagggtgtccgggtgggcctgcgagcgctccagaagccactcgccgaggcgtgtatacagattggccggcggggccgcgcgaagctgcagctccaggtccgcgagttccccgtaaaaggcgtccgtctcccgaatgacatccctagccacaaggatcagcttcgccagcgccaggcgaccgatcagagagttttcgtccagcacgtgctggacgaggggcagatgggcggccacgtcggccaggctcaggcgcgtggaggccagaaagtcccccacggccgttttccggggcagcatgctcagggtaaactccagcagggcggcggccgggccggccaccccggcctgggtgtgcgtccgggccccgttctcgatgagaaaggcgaggacgcgttcaaagaaaaaaataacacagagctccagcagccccggagaagccggatacggcgaccgtaaggcgctgatggtgagccgcgaacacgcggcgacctcgcgggccagggcggcggagcacgcggtgaacttaaccgccgtggcggccacgtttgggtgggcctcgaacagctgggcaaggtctgcgcccgggggctcgggtgagcggcgagtcttcagcgcctcgagggcctgcgaggacgccggaaccgtgggcccgtcgtcctcgcccgcctcggcgaccggcggcccggccgggtcggggggtgccgaggcgaggacaggctccggaacggaggcggggaccgcggccccgacgggggttttgcctttgggggtggatttcttcttggttttggcagggggggccgagcgtttcgttttctcccccgaagtcaggtcttcgacgctggaaggcggagtccaggtgggtcggcggcgcttgggaaggccggccgagtagcgtgcccggtgccgaccaaccgggacgacgcccatctccaggacccgcatgtcgtcgtcatcttcttcggccgcctctgcggcggggggcttgggggcggagggaggcggtggtgggatcgcggagggtgggtcggcggaggggggatccgtgggtggggtacccttcagggccaccgcccatacatcgtcgggcgcccgattcgggcgcttggcctctggttttgccgacggaccggccgtcccccgggatgtctcggaggccctgtcgtcgcgacgggcccgggtcggtggcggcgactgggcggctgtgggcgggtggggccccgtgccccctaccccctcccgggggcccacgccgacgcagggctcccccaggcccgcgatctcgccccgcagggggtgcgtgatggccacgcgccgttcgctgaacgcttcgtcctgcaggtaagtctcgctggccccgtaaagatgcagagccgcggccgtcaagtccgcaggagccgcgggttccgggcccgacggcacgaaaaacaccatggctcccgcccaccgtacgtccgggcgatcgcgggtgtaatacgtcaggtatggatacatgtcccccgcccgcactttggcgatgaacgcgggggtgccctccggaaggccgtgcgggtcaaaaaggtatgcggtgtcgccgtccctgaacagccccatccctagggggccaatggttaggagcgtgtacgacagggggcgcagggcccacgggccggcgaagaacgtgtgtgcggggcattgtgtctccagcaggcccgccgcgggctccccgaagaagcccacctcgccgtatacgcgcgagaagacacagcgcagtccgccgcgcgcccctgggtactcgaggaagttggggagctcgacgatcgaacacatgcgcggcggcccagggcccgcggtcgcgcgcgtccactcgcccccctcgaccaaacaaccctcgatggcctccgcggacagaacgtcgcgagggcccacatcaaatatgaggctgagaaaggacagcgacgagcgcatgcacgataccgacccccccggctccaggtcgggcgcgaactggttccgagcaccggtgaccacgatgtcgcgatcccccccgcgttccatcgtggagtgcggtggggtgcccgcgatcatatgtgccctactggccagagacccggcctgtttatggaccggacccccggggttagtgttgtttccgccacccatgcccccgtaccatggccccggttcccctgattaggctacgagtcgcggtgatcgcttcccaaaaaccgagctgcgtttgtctgtcttgatctttcccccccccgcccgcccgcccgcccgcacaccataacaccgagaacaacacacgggggtgggcgtaacataataaagctttattggtaactagttaacggcaagtccgtgggtggcgcgacggtgtcctccgggctcatctcgtcgtcctcgacgggggtgttggaatgaggcgccccctcgcggtccgcctggcgtgggccgtgcccataggcctccggcttctgtgcgtccatgggcataggcgcggggagactgtttccggcgtcgcggacctccaggtccctgggagactccggtccggctaacggacgaaacgcggaagcgcgaaacacgccgtcggtgacccgcaggagctcgttcatcagtaaccaatccatactcagcgtaacggccagcccctggcgagacagatccacggagtccggaaccgcggtcgtctggcccagggggccgaggctgtagtccccccaggcccctaggtcgcgacggctcgtaagcacgacgcggtcggccgcggggctttgcgggggggcgtcctcgggcgcatgcgccattacctctcggatggccgcggcgcgctggtcggccgagctgaccaagggcgccacgaccacggcgcgctccgtctgcaggcccttccacgtgtcgtggagttcctggacaaactcggccacgggctcgggtcccgcggccgcgcgcgcggcttgatagcaggccgagagacgccgccagcgcgctagaaactgacccatgaagcaaaacccggggacctggtctcccgacagcagcttcgacgcccgggcgtgaatgccggacacgacggacagaaacccgtgaatttcgcgccggaccacggccagcacgttgtcctcgtgcgacacctgggccgccagctcgtcgcacacccccaggtgcgccgtggtttcggtgatgacggaacgcaggctcgcgagggacgcgaccagcgcgcgcttggcgtcgtgatacatgctgcagtactgactcaccgcgtcccccatggcctcggggggccagggccccaggcggtcgggcgtgtccccgaccaccgcatacaggcggcgcccgtcgctctcgaaccgacactcgaaaaaggcggagagcgtgcgcatgtgcagccgcagcagcacgatggcgtcctccagttggcgaatcagggggtctgcgcgctcggcgaggtcctgcagcaccccccgggcggccagggcgtacatgctaatcaacaggaggctggtgcccacctcggggggcggggggggctgcagctggaccaggggccgcagctgctcgacggcacccctggagatcacgtacagctcccggagcagctgctctatgttgtcggccatctgcatagtggggccgaggccgccccgggcggccggttcgaggagggtaatcagcgcgcccagtttggtgcgatggccctcgaccgtggggagatagcccagcccaaagtcccgggcccaggccaacacacgcagggcgaactcgaccgggcgtggaaggtaggccgcgctacacgtggccctcaacgcgtccccgaccaccagggccagaacgtaggggacgaagcccgggtcggcgaggacgttggggtgaatgccctcgagggcggggaagcggatctgggtcgccgcggccaggtggacagagggggcgtggctgggctgcccgacggggagaagcgcggacagcggcgtggccggggtggtgggggtgatgtcccagtgggtctgaccatacacgtcgatccagatgagcgccgtctcgcggagaaggctgggttgaccggaactaaagcggcgctcggccgtctcaaactcccccacgagcgcccgccgcaggctcgccagatgttccgtcggcacggccggacccatgatacgcgccagcgtctggctcagaacgccccccgacaggccgaccgcctcgcagagccgcccgtgcgtgtgctcgctggcgccctggacccgcctgaaagtttttacgtagttggcatagtacccgtattcccgcgccagaccaaacacgttcgaccccgcgagggcaatgcacccaaagagctgctggacttcgccgagtccgtggccggcgggcgtccgcgcggggacgcccgccgccagaaacccctccagggccgaaaggtagtgcgtgcagtgcgagggcgtgaacccagcgtcgatcagggtgttgatcaccacggagggcgaattggtattctggatcaacgtccacgtctgctgcagcagagccagcagccgctgctgggcgccggcggagggctgctccccgagctgcagcaggctggagacggcaggctggaagactgccagtgccgacgaactcaggaacggcacgtcgggatcaaacacggccacgtccgtccgcacgcgcgccattagcgtccccgggggcgcacaggccgagcgcgggctgacgcggctgagggccgtcgacacgcgcacctcctcgcggctgcgaaccatcttgttggcctccagtggcggaatcattatggccgggtcgatctcccgcacggtgtgctgaaactgcgccaacaggggcggcgggaccacagccccccgctcgggggtcgtcaggtactcgtccaccagggccaacgtaaagagggcccgtgtgaggggagtgagggtcgcgtcgtctatgcgctggaggtgcgccgagaacagcgtcacccgattactcaccagggccaagaaccggaggccctcttgcacgaacggggcggggaagagcaggctgtacgccggggtggtaaggttcgcgctgggctgccccaacgggaccggcgccatcttgagcgacgtctccccaagggcctcgatggaggtccgcgggctcatggccaagcagctcttggtgacggtttgccagcggtctatccactccacggcgcactggcggacgcggaccggccccagggccgccgcggtgcgcaggccggcggaatccagcgcatgggacgtgtcggagccggtgaccgcgaggatggtgtccttgatgacctccatctcccggaaggcctggtcgggggcctcggggagagccaccaccaagcggtgtacgagcaacccggggaggttctcggccaagagcgccgtctccggaagcccgtgggcccggtggagcgcgcacaggtgttccagcagcggccgccagcatgcccgcgcgtctgccggggcgatggccgttcccgacaacagaaacgccgccatggcggcgcgcagcttggccgtggccagaaacgccgggtcgtccgccccgtttgccgtctcggccgtgggggttggcggttggcgaaggccggctaggctcgccaataggcgctgcataggtccgtccgagggcggaccggcgggtgaggtcgtgacgacgggggcctcggacgggagaccgcggtctgccatgacgcccggctcgcgtgggtgggggacagcgtagaccaacgacgagaccgggcgggaatgactgtcgtgcgctgtagggagcggcgaattatcgatcccctgcggccctccaggaaccccgcaggcgttgcgagtaccccgcgtcttcgcggggtgttatacggccacttaagtcccggcatcccgttcgcggacccaggcccgggggattgtccggatgtgcgggcagcccggacggcgtgggttgcggactttctgcggggcggcccaaatggccctttaaacgtgtgtatacggacgcgccgggccagtcggccaacacaacccaccggaggcggtagccgcgtttggctgtggggtgggtggttccgccttgcgtgagtgtcctttcgacccccccctcccccgggtcttgctaggtcgcgatctgtggtcgcaatgaagaccaatccgctacccgcaaccccttccgtgtggggcgggagtaccgtggaactcccccccaccacacgcgataccgcggggcagggcctgcttcggtgcgtcctgcgccccccgatctctcgccgcgacggcccagtgctccccagggggtcgggaccccggagggcggccagcacgctgtggttgcttggcctggacggcacagacgcgccccctggggcgctgacccccaacgacgataccgaacaggccctggacaagatcctgcggggcaccatgcgcgggggggcggccctgatcggctccccgcgccatcatctaacccgccaagtgatcctgacggatctgtgccaacccaacgcggatcgtgccgggacgctgcttctggcgctgcggcaccccgccgacctgcctcacctggcccaccagcgcgccccgccaggccggcagaccgagcggctgggcgaggcctggggccagctgatggaggcgaccgccctggggtcggggcgagccgagagcgggtgcacgcgcgcgggcctcgtgtcgtttaacttcctggtggcggcgtgtgccgcctcgtacgacgcgcgcgacgccgccgatgcggtacgggcccacgtcacggccaactaccgcgggacgcgggtgggggcgcgcctggatcgtttttccgagtgtctgcgcgccatggttcacacgcacgtcttcccccacgaggtcatgcggtttttcggggggctggtgtcgtgggtcacccaggacgagctagcgagcgtcaccgccgtgtgcgccgggccccaggaggcggcgcacaccggccacccgggccggccccgctcggccgtgatcctcccggcgtgtgcgttcgtggacctggacgccgagctggggctggggggcccgggcgcggcgtttctgtacctggtattcacttaccgccagcgccgggaccaggagctgtgttgtgtgtacgtgatcaagagccagctccccccgcgcgggttggagccggccctggagcggctgtttgggcgcctccggatcaccaacacgattcacggcaccgaggacatgacgcccccggccccaaaccgaaaccccgacttccccctcgcgggcctggccgccaatccccaaaccccgcgttgctcggctggccaggtcacgaacccccagttcgccgacaggctgtaccgctggcagccggaccttcgggggcgccccaccgcacgcacctgtacgtacgccgcctttgcagagctcggcatgatgcccgaggatagtccccgctgcctgcaccgcaccgagcgctttggggcggtcagcgtccccgttgttattctggaaggcgtggtgtggcgccccggcgagtggcgggcatgcgcgtgagcgtagcaaacgccccgcccacacaacgctccgcccccaaccccttccccgctgtcactcgtggttcgttgacccggacgtccgccaaataaagccactgaaacccgaaacgcgagtgttgtaacgtcctttgggcgggaggaagccacaaaatgcaaatgggatacatggaaggaacacacccccgtgactcaggacatcggcgtgtccttttgggtttcactgaaactggcccgcgccccacccctgcgcgatgtggataaaaagccagcgcgggtggtttagggtaccacaggtgggtgctttggaaacttgtcggtcgccgtgctcctgtgagcttgcgtccctccccggtttcctttgcgctcccgccttccggacctgctctcgcctatcttctttggctgtcggtgcgattcgtcaggcagcggccttgtcgaatctcgaccccaccactcgccggacccgccgacgtcccctctggagcccgccgaaacccgccgcgtctgttgaaatggccagccgcccagccgcatcctctcccgtcgaagcgcgggccccggttgggggacaggaggccggcggccccagcgcagccacccagggggaggccgccggggcccctctcgcccacggccaccacgtgtactgccagcgagtcaatggcgtgatggtgctttccgacaagacgcccgggtccgcgtcctaccgcatcagcgatagcaactttgtccaatgtggttccaactgcaccatgattatcgacggagacgtggtgcgcgggcgcccccaggacccgggggccgcggcatcccccgctcccttcgttgcggtgacaaacatcggagccggcagcgacggcgggaccgccgtcgttgcattcgggggaaccccacgtcgctcggcggggacgtctaccggtacccagacggccgacgtcccagccgaggcccttgggggcccccctcctcctccccgcttcaccctgggtggcggctgttgctcctgtcgcgacacacggcgccgctctgcggtattcgggggggagggggatcccgtcggccccgcggagttcgtctcggacgaccggtcgtccgattccgactcggatgactcggaggacaccgactcggagacgctgtcacacgcctcctcggacgtgtccggcggggccacgtacgacgacgcccttgactccgattcgtcatcggatgactccctgcagatagatggccccgtgtgtcgcccgtggagcaatgacaccgcgcccctggatgtttgccccgggacccccggcccgggcgccgacgccggtggtccctcagcggtagacccacacgcgccgacgacaggggccggcgctggtcttgcggccgatcccgccgtggcccgggacgacgcggaggggctttcggacccccggccacgtctgggaacgggcacggcctaccccgtccccctggaactcacgcccgagaacgcggaggccgtggcgcgctttctgggagatgccgtgaaccgcgaacccgcgctcatgctggagtacttttgccggtgcgcccgcgaggaaaccaagcgtgtcccccccaggacattctgcagcccccctcgcctcacggaggacgactttgggcttctcaactacgcgctcgtggagatgcagcgcctgtgtctggacgttcctccggtcccgccgaacgcatacatgccctattatctcagggagtatgtgacgcggctggtcaacgggttcaagccgctggtgagccggtccgctcgcctttaccgcatcctgggggttctggtgcacctgcggatccggacccgggaggcctcctttgaggagtggctgcgatccaaggaagtggccctggactttggcctgacggaaaggcttcgcgagcacgaagcccagctggtgatcctggcccaggctctggaccattacgactgtctgatccacagcacaccgcacacgctggtcgagcgggggctgcaatcggccctgaagtatgaggagttttacctaaagcgctttggcgggcactacatggagtccgtcttccagatgtacacccgcatcgccggctttttggcctgccgggccacgcgcggcatgcgccacatcgccctggggcgagaggggtcgtggtgggaaatgttcaagttctttttccaccgcctctacgaccaccagatcgtaccgtcgacccccgccatgctgaacctggggacccgcaactactacacctccagctgctacctggtaaacccccaggccaccacaaacaaggcgaccctgcgggccatcaccagcaacgtcagtgccatcctcgcccgcaacgggggcatcgggctatgcgtgcaggcgtttaacgactccggccccgggaccgccagcgtcatgcccgccctcaaggtcctcgactcgctggtggcggcgcacaacaaagagagcgcgcgtccgaccggcgcgtgcgtgtacctggagccgtggcacaccgacgtgcgggccgtgctccggatgaagggggtcctcgccggcgaagaggcccagcgctgcgacaatatcttcagcgccctctggatgccagacctgtttttcaagcgcctgattcgccacctggacggcgagaagaacgtcacatggaccctgttcgaccgggacaccagcatgtcgctcgccgactttcacggggaggagttcgagaagctctaccagcacctcgaggtcatggggttcggcgagcagatacccatccaggagctggcctatggcattgtgcgcagtgcggccacgaccgggagccccttcgtcatgttcaaagacgcggtgaaccgccactacatctacgacacccagggggcggccatcgccggctccaacctctgcaccgagatcgtccatccggcctccaagcgatccagtggggtctgcaatctgggaagcgtgaatctggcccgatgcgtctccaggcagacgtttgactttgggcggctccgcgacgccgtgcaggcgtgcgtgctgatggtgaacatcatgatcgacagcacgctacaacccacgccccagtgcacccgcggcaacgacaacctgcggtccatgggaatcggcatgcagggcctgcacacggcctgcctgaagctggggctggatctggagtctgccgaatttcaggacctgaacaaacacatcgccgaggtgatgctgctgtcggcgatgaagaccagcaacgcgctgtgcgttcgcggggcccgtcccttcaaccactttaagcgcagcatgtatcgcgccggccgctttcactgggagcgctttccggacgcccggccgcggtacgagggcgagtgggagatgctacgccagagcatgatgaaacacggcctgcgcaacagccagtttgtcgcgctgatgcccaccgccgcctcggcgcagatctcggacgtcagcgagggctttgcccccctgttcaccaacctgtttagcaaggtgacccgggacggcgagacgctgcgccccaacacgctcctgctaaaggaactggaacgcacgtttagcgggaagcgcctcctggaggtgatggacagtctcgacgccaagcagtggtccgtggcgcaggcgctcccgtgcctggagcccacccaccccctccggcgattcaagaccgcgtttgactacgaccagaagttgctgatcgacctgtgtgcggaccgcgccccctacgtcgaccatagccaatccatgaccctgtatgtcacggagaaggcggacgggaccctcccagcctccaccctggtccgccttctggtccacgcatataagcgcggactaaaaacagggatgtactactgcaaggttcgcaaggcgaccaacagcggggtctttggcggcgacgacaacattgtctgcacgagctgcgcgctgtgaccgacaaaccccctccgcgccaggcccgccgccactgtcgtcgccgtcccacgcgctcccccgctgccatggattccgcggccccagccctctcccccgctctgacggcccatacgggccagagcgcgccggcggacctggcgatccagattccaaagtgccccgaccccgagaggtacttctacacctcccagtgtcccgacattaaccacctgcgctccctcagcatccttaaccgctggctggaaaccgagcttgttttcgtgggggacgaggaggacgtctccaagctttccgagggcgagctcagcttttaccgcttcctcttcgctttcctgtcggccgccgacgacctggttacggaaaacctgggcggcctctccggcctgtttgagcagaaggacattctccactactacgtggagcaggaatgcatcgaagtcgtacactcgcgcgtgtacaacatcatccagctggtgctttttcacaacaacgaccaggcgcgccgcgagtacgtggccggcaccatcaaccacccggccatccgcgccaaggtggactggttggaagcgcgggtgcgggaatgcgcctccgttccggaaaagttcattctcatgatcctcatcgagggcatcttttttgccgcctcgtttgccgccatcgcctaccttcgcaccaacaaccttctgcgggtcacctgccagtcaaacgacctcatcagccgggacgaggccgtgcacacgacggcctcgtgttacatctacaacaactacctcggcgggcacgccaagcccccgcccgaccgcgtgtacgggctgttccgccaggcggtcgagatcgagatcggatttatccgatcccaggcgccgacggacagccatatcctgagcccggcggcgctggcggccatcgaaaactacgtgcgattcagcgcggatcgcctgttgggccttatccacatgaagccactgttttccgccccaccccccgacgccagctttccgctgagcctcatgtccaccgacaaacacaccaattttttcgagtgtcgcagcacctcctacgccggggcggtcgtcaacgatctgtgagggtcgcggcgcgcttctacccgtgtttgcccataataaacctctgaaccaaactttgggtctcattgtgattcttgtcagggacgcgggggtgggagaggataaaaggcggcgcaaaaagcagtaaccaggtccggccagattctgagggcataggataccataattttattggtgggtcgtttgttcggggacaagcgcgctcgtctgacgtttgggctactcgtcccagaatttggccaggacgtccttgtagaacgcgggtgggggggcctgggtccgcagctgctccagaaacctgtcggcgatatcaggggccgtgatatgccgggtcacgatagatcgcgccaggttttcgtcgcggatgtcctggtagataggcaggcgtttcagaagagtccacggcccccgctccttggggccgataagcgatatgacgtacttaatgtagcggtgttccaccagctcggtgatggtcatgggatcggggagccagtccagggactctggggcgtcgtggatgacgtggcgtcgccggctggccacataactgcggtgctcttccagcagctgcgcgttcgggacctggacgagctcgggcggggtgagtatctccgaggaggacgacctggggccggggtggcccccggtaacgtcccggggatccagggggaggtcctcgtcgtcttcgtatccgccggcgatctgttgggttagaatttcggtccacgagacgcgcgtctcggtgccgccggtggccggcggcagagggggcctggtttccgtggagcgcgagctggtgtgttcccggcggatggcccgccgggtctgagagcgactcgggggggtccagtgacattcgcgcagcacatcctccacggaggcgtaggtgttattgggatggaggtcggtgtggcagcggacaaagagggccaggaactgggggtagctcatcttaaagtacttcagtatatcgcgacagttgatcgtgggaatgtagcaggcgctaatatccaacacaatatcgcagcccatcaacaggaggtcagtgtccgtggtgtacacgtacgcgaccgtgttggtgtgatagaggttggcgcaggcatcgtccgcctccagctgacccgagttaatgtaggcgtaccccagggcccggagaacgcgaatacagaacagatgcgccagacgcagggccggcttcgagggcgcggcggacggcagcgcggctccggacccggccgtcccccgggtccccgaggccagagaggtgccgcgtcggcgcatgttggaaaaggcagagctgggtctggagtcggtgatgggggaaggcggtggagaggcgtccacgtcactggcctcctcgtccgtccggcactgggccgtcgtgcgggccaggatggccttggctccaaacacaaccggctccatacaattgaccccgcgatcggtaacgaagatggggaaaagggacttttgggtaaacacctttaataagcgacagaggcagtgtagcgtaatggcctcgcggtcgtaactggggtatcggcgctgatatttgaccaccaacgtgtacatgacgttccacaggtccacggcaatgggggtgaagtacccggccggggccccaaggccccggcgcttgaccagatggtgtgtgtgggcaaacttcatcatcccgaacaaacccatgtcaggtcgattgtaactgcggatcggcctaactaaggcgtggttggtgcgacggtccgggacacccgagcctgtctctctgtgtatggtgacccagacaacaacaccgacacaagaggacaataatccgttaggggacgctctttataatttcgatggcccaactccacgcggattggtgcagcaccctgcatgcgccggtgcgggccaaccttccccccgctcattgcctcttccaaaagggtgtggcctaacgagctgggggcgtatttaatcaggctagcgcggcgggcctgccgtagtttctggctcggtgagcgacggtccggttgcttgggtcccctggctgccatcaaaaccccaccctcgcagcggcatacgccccctccgcgtcccgcacccgagaccccggcccggctgccctcaccaccgaagcccacctcgtcactgtggggtgttcccagcccgcgttgggatgacggattcccctggcggtgtggcccccgcctcccacgtggaggacgcgtcggacgcgtccctcgggcagccggaggagggggcgccctgccaggtggtcctgcagggcgccgagcttaatggaatcctacaggcgtttgccccgctgcgcacgagccttctggactcgcttctggttatgggagaccggggcatccttatccataacacgatctttggggagcaggtgttcctgcccctggaacactcgcaattcagtcggtatcgctggcgcggacccacggcggcgttcctgtctctcgtggaccagaagcgctccctcctgagcgtgtttcgcgccaaccagtacccggacctacgtcgggtggagttggcgatcacgggccaggccccgtttcgcacgctggttcagcgcatatggacgacgacgtccgacggcgaggccgttgagctagccagcgagacgctgatgaagcgcgaactgacgagctttgtggtgctggttccccagggaacccccgacgttcagttgcgcctgacgaggccgcagctcaccaaggtccttaacgcgaccggggccgatagtgccacgcccaccacgttcgagctcggggttaacggcaaattttccgtgttcaccacgagtacctgcgtcacatttgctgcccgcgaggagggcgtgtcgtccagcaccagcacccaggtccagatcctgtccaacgcgctcaccaaggcgggccaggcggccgccaacgccaagacggtgtacggggaaaatacccatcgtaccttctctgtggtcgtcgacgattgcagcatgcgggcggtgctccggcgactgcaggtcgccgggggcaccctcaagttcttcctcacgacccccgtccccagtctgtgcgtcaccgccaccggtcccaacgcggtatcggcggtatttctcctgaaaccccagaagatttgcctggactggctgggtcatagccaggggtctccttccgccgggagctcggcctcccgggcctctgggagcgagccaacagacagccaggactccgcgtcggacgcggtcagccacggcgatccggaagacctcgatggcgctgcccgggcgggagaggcgggggcctcgtacgcctgtccgatgccgtcgtcgaccacgcgggtcactcccacgaccaagcgggggcgctcggggggcgaggatgcgcacgcggacacggccctaaagaaacctaagacggggtcgcccaccgcacccccgcccgcagatccagtccccctggacacggaggacgactccgatgcggcggacgggacggcggcccgtcccgccgctccagacgcccgaagcggaagccgttacgcgtgttactttcgcgacctcccgaccggagaagcaagccccggcgccttctccgccttccgggggggcccccaaaccccgtctggttttggattcccctgacggggcggggccttagcggccgcccaaccctcgcaacatcccggggttaatgtaaataaacttggtattgcccaacactctcccgcgtgtcgcgtgtggttcatgtgtgtgcctggcgcccccaccctcgggttcgtgtatttcctttccctgtccttataaaagccgtatgtggggcgctgacggaaccaccccgcgtgccatcacggccaaggcgcgggatgctccgcaacgacagccaccgggccgcgtccccggaggacggccagggacgggtcgacgacggacggccacacctcgcgtgcgtgggggccctggcgcgggggttcatgcatatctggcttcaggccgccacgctgggttttgcgggatcggtcgttatgtcgcgcgggccgtacgcgaatgccgcgtctggggcgttcgccgtcgggtgcgccgtgctgggctttatgcgcgcgccccctcccctcgcgcggcccaccgcgcggatatacgcctggctcaaactggcggccggtggagcggcccttgttctgtggagtctcggggagcccggcacgcagccgggggccctggccccgggcccggccacccagtgcctggcgctgggcgccgcctatgcggcgctcctggtgctcgccgatgacgtctatccgctctttctcctcgccccggggcccctgttcgtcggcaccctggggatggtcgtcggcgggctgacgatcggaggcagcgcgcgctactggtggatcggtgggcccgccgcggccgccctggccgcggcggtgttggcgggcccgggggcgaccaccgccagggactgcttctccagggcgtgccccgaccaccgccgcgtctgcgtcatcgtcgcaggcgagtctgtttcccgccgccccccggaggacccagagcgacccggggacccagggccaccgtcccccccgacaccccaacgatcccaggggccgccggccgatgaggtcgcaccggccggggtagcgcggcccgaaaacgtctgggtgcccgtggtcacctttctgggggctggcgcgctcgccgtcaagacggtgcgagaacatgcccggggaacgccgggcccgggcctgccgctgtggccccaggtgtttctcggaggccatgtggcggtggccctgacggagctgtgtcaggcgcttgcgccctgggaccttacggacccgctgctgtttgttcacgccggactgcaggtcatcaacctcgggttggtgtttcggttttccgaggttgtcgtgtatgcggcgctagggggtgccgtgtggatttcgttggcgcaggtgctggggctccggcgtcgcctgcacaggaaggaccccggggacggggcccggttggcggcgacgcttcggggcctcttcttctccgtgtacgcgctggggtttggggtgggggcgctgctgtgccctccggggtcaacgggcgggcggtcgggcgattgatatatttttcaataaaaggcattagtcccgaagaccgccggtgtgtgatgatttcgccataacacccaaaccccggatggggcccgggtataaattccggaaggggacacgggctaccttcactaccgagggcgcttggtcgggaggccgcatcgaacgcacacccccatccggtggtccgtgtggaggtcgtttttcagtgcccggtctcgctttgccgggaacgctagccgatccctcgcgagggggaggcgtcgggcatggccccggggcgggtgggccttgccgtggtcctgtggagcctggtgtggctcggggcgggggtgtccgggggctcggaaactgcctccaccgggcccacgatcaccgcgggagcggtgacgaacgcgagcgaggcccccacatcggggtcccccgggtcagccgccagcccggaggtcacccccacatcgaccccaaaccccaacaatgtcacacaaaaccaaaccacccccaccgagccggccagccccccaacaacccccaagcccacctccacacccaaaagcccccccacgtccacccccgaccccaaacccaagaacaacaccacccccgccaagtcggaccgccccactaaaccccccgggcccgtgtggtgcgaccgccgcgatttattggcccggtacggctcgcgggtgcagatccgatgccggtttcggaattccacccgcatggagttccgcctccagatatggcgttactccatgggtccgtcccccccaatcgctccggctcccgacctagaggaggtcctgacgaacatcaccgccccacccgggggactcctggtgtacgacagcgcccccaacctaacggacccccacgtgctctgggcggagggggccggcccgggcgccgaccctccgttgtattctgtcaccgggccgctgccgacccagcggctgattatcggcgaggtgacgcccgcgacccagggaatgtattacttggcctggggccggatggacagcccgcacgagtacgggacgtgggtgcgcgtccgcatgttccgccccccgtctctgaccctccagccccacgcggtgatggagggtcagccgttcaaggcgacgtgcacggccgccgcctactacccgcgtaaccccgtggagtttgtctggttcgaggacgaccaccaggtgtttaacccgggccagatcgacacgcagacgcacgagcaccccgacgggttcaccacagtctctaccgtgacctccgaggctgtcggcggccaggtccccccgcggaccttcacctgccagatgacgtggcaccgcgactccgtgacgttctcgcgacgcaatgccaccgggctggccctggtgctgccgcggccaaccatcaccatggaatttggggtccggcatgtggtctgcacggccggctgcgtccccgagggcgtgacgtttgcctggttcctgggggacgacccctcaccggcggctaagtcggccgttacggcccaggagtcgtgcgaccgccccgggctggctacggtccggtccaccctgcccatttcgtacgactacagcgagtacatctgtcggttgaccggatatccggccgggattcccgttctagagcaccacggcagtcaccagcccccacccagggaccccaccgagcggcaggtgatcgaggcgatcgagtgggtggggattggaatcggggttctcgcggcgggggtcctggtcgtaacggcaatcgtgtacgtcgtccgcacatcacagtcgcggcagcgtcatcggcggtaacgcgagacccccccgttacctttttaatatctatatagtttggtccccctctatcccgcccaccgctgggcgctataaagccgccaccctctcttccctcaggtcatccttggtcgatcccgaacgacacacggcgtggagcaaaacgcctccccctgagccgctttcctaccagcgcaacggcatgcctctgcgggcatcggaacacgcctaccggcccctgggccccgggacaccccccatgcgggctcggctccccgccgcggcctgggttggcgtcgggaccatcatcgggggagttgtgatcattgccgcgttggtcctcgtgccctcgcgggcctcgtgggcactttccccatgcgacagcggatggcacgagttcaacctcgggtgcatatcctgggatccgacccccatggagcacgagcaggcggtcggcggctgtagcgccccggcgaccctgatcccccgcgcggctgccaaacagctggccgccgtcgcacgcgtccagtcggcaagatcctcgggctactggtgggtgagcggagacggcattcgggcctgcctgcggctcgtcgacggcgtcggcggtattgaccagttttgcgaggagcccgcccttcgcatatgctactatccccgcagtcccgggggctttgttcagtttgtaacttcgacccgcaacgcgctggggctgccgtgaggcgcgtgtactgcggtctgtctcgtctcctcttctccccttccctccccctccgcatcccaggatcacaccggccaacgagggttggggggtccggcacggacccaaaataataaacacacaatcacgtgcgataaaaagaacacgcggtcccctgtggtgtttttggttatttttattaaatctcgtcgtcaaacagggggaaaggggcgtggtctagcgacggcagcacgggtggaggcgttcaccggctccggcgtccttcgcgtttaagcttggtcaggagggcgctcagggcggcgacgttggtcgggccgtcgttggtcagggcgttggctcgatggcgggcgaggacgggcgaggggctcaacggcgggggcgggggcccggtgcggcccgggggggaaaatagggcggatcccccccagtcgtacaggggattttccgcctcaatgtacggggaggccggcgctgcattcgccgtgttcgcgcagacgttttcgtagacccgcatccatggtatttcctcgtagacacgccccccgtcctcgctcacagtctcgtatattgactcgtcgtcctcgtagggggcgtgccgttcgcgggccgaggcggcgtgggtggctttgcggcgggcgtcgtcgtcgtcgtcggccgtcagatacgtggcttccatctggtcgggttctccctccggggcgggtccccacccccgtggccgatcgaggctccccagagacgcgcgccggacgaggagggggcacgtcgccgccggcggtcgcctgtcgggtcccgcgacgttacgggccgggaggcgcgggggcacctcccccatgtgcgtgtaatacgtggccggctgtgcggccgcagcggggggctcggcgaccgggtcgtccgcatccggaagcgggggcgccgcgccgtccgcgcggcgcctccggaaccgccgggtggccgcgggggtcgagtgtaggcgaggtcgggggaggggcgggggctcgttgtcgcgccgcgcccgctgaatcttttcccgacaggtcccaccccccgcgcgatgcccccccgggccgcgggccatgtcgtccgggggaggccccgcggaccacgtcgtccggcgagacgccacgagccgcaggatggactcgtagtggagcgacggcgccccgctgcggagcagatccgcggccagggcggccccgaaccaagccttgatgctcaactccatccgggcccagctgggggcggtcatcgtggggaacaggggggcggtggtccgacagaaacgctcctggctgtccaccgcggcccgcagatactcgttgttcaggctgtcggtggcccagacgccgtacccggtgagggtcgcgttgatgatatactgggcgtggtgatggacgatcgacagaacctccaccgtggatacgacggtatccacggtcccgtacgtaccgccgctccgcttgccggtctgccacaggttggctaggcgcgtcaggtggcccaggacgtcgctgaccgccgccctgagcgccatgcactgcatggagccggtcgtgccgctgggaccccggtccagatggcgcgcgaacgtttccgcgggcgcctccgggctgccgccgagcgggaggaaccggcgattggagggactcagccggtggcatacgtgcttgtctgtcgtccacagcatccaggacgcccaccggtacagcacggagacgtaggccaggagctcgttgagccgcagtgcggtgtcggtgctggggcggcttgggtccgccgggcgcataaagaacatgtactgctgaatccgatggagggcgtcgcgcaggccggccacggtggcggcgtacttggccgccgcggccccgctcttgaacggggtgcgcgccagcagctttggcgccagggtgggccgcagcagcacgtgaaggctggggtcgcagtcgcccacggggtcctcggggacgtccaggccgctgggcaccaccgtctgcaggtacttccagtactgcgtgaggatggcgcggctcaactggccgccggtgagctccacctcgcccagcgcctgggtggcggccgaagcgtagtgccggatgtactcgtagtgcgggtcgctggcgagcccgtccacgatcaaactctcgggaaccgtgttgtgttgccgcgcggccaaccggacgctgcgatcggtgcaggtcagaaacgccggctgcgcgtcgtcggagcgctgccgcaaggcgcccacggccgcgctaaggagcccctccggggtggggagcagacacccgccgaagatgcgccgctcgggaacgcccgcgttgtcgccgcggatcaggttggcaggcgtcaggcaccgcgccagccgcagggagctcgcgccgcgcgtccggcgctgcatggtgacgcccgttcggtcgggacccgccggtcggagttatgccgcgtccagggccatcggggcgctttttatcgggaggagcttatgggcgtggcgggcctcccagcccggtcgcgcgcctccccgacacgtgcgcccgcagggcggcggccccctcgtctcccatcagcagtttcctaaactgggacatgatgtccaccacgcggacccgcgggcccaacacggacccgccgcttacgggggcgggggggaagggctccaggtccttgagaagaaaggcggggtctgccgtcccggacacgggggcccggggcgctgaggaggcggggcgcagatccacgtgctccgcggccgcgcggacgtccgcccagaacttggcgggggtggtgcgcgcgtacaggggctgggtcgctcggaggacgcacgcgtagcgcaggggggtgtacgtgcccacctcgggggccgtgaatcccccgtcaaacgcggccagtgtcacgcacgccaccacggtgtcggcaaagcccagcagccgctgcaggacgagcccggcggccagaatggcgcgcgtggccgccgcgtcgtcccggcgccggtgcgcgtccccgcacgcccgggcgtactttaaggtcacggtcgccagggccgtgtgcagcgcgtacaccgcagcgcccagcacggcgttgagcccgctgttggcgagcagccggcgcgctgcggtgtcgcccagcgcctcgtgctcggcccccacgaccgcggggcttcccaggggcagggcgcgaaacagctcctcccgcgccacgtccgcaaaggcggggtggtgcacgtgcgggtgcaggcgcgcccccacgaccaccgagagccactggaccgtctgctccgccatcaccgccagcacatccagcacgcgccccaggaaggcggcctcccgcgtcaaaacgcaccggacggcgtcgggattgaagcgggcgagcagggccccggtggccaggtacgtcatgcggccggcatagcgggcggccacgcgacagtcgcggtccagcagcgcgcgcaccccgggccagtacagcagggaccccagcgagctgcgaaacaccgcggcgtcggggccggattggggggacactaacccccccgcgctcagtaacggcacggccgcggccccgacgggacgcaacgccgtgaggctcgcgaactgccgcctcagctcggcagccctgtcgtccaggtccgacccgcgcgcctctgcgtgaaggcgcgtcccgcacacccacccgttgatggccagccgcacgacggcatccgccaaaaagctcatcgcctgggcggggctggtttttgttcgacgatccgtcaggtcaagaatcccatcgcccgtgatataccaggccaacgcctcgccctgctgcagggtttggcggaaaaacaccgcggggttgtcgggggaggcgaagtgcatgacccccacgcgcgataacccgaacgcgctatccggacacgggtaaaacccggccggatgccccagggctagggcggagcgcacggactcgtcccacacggcaacctgaggggccagtcgatccaacgggaatgccgcccggagctccgggcccggcacgcgtccctccagaacctccaccttgggcggggaacgggccccgccgccgtcctccggcccgacgtcttccgggtagtcgtcctcctcgtactgcagctcctctaggaacagcggcgacggcgccacccgcgaaccgccgacccgccccaaaatagcccgcgcgtcgacgggacccaggtatcccccctgccgggcctgcggaggaccgcggggaacctcatcatcatcgtccaggcgaccgcgcaccgactggctacgggccgcatcgggcccggggcgctgccgggacgctcggcgatgggatgtgggcggggcttccgacgcgcgccgtcgtcgggctcgcgggccttcccgtcgacggcgcacgggcggctcgtcgcccgccatctcctccagagcctctagctcgctgtcgtcatccccgcggaacaccgcacgcaggtaccccatgaaccccaccccatcgcccgctggctcgtccgccacgggcgaggcgcgggggcgggtggatgcgcgcctcctacgccccgcgggttcgcgagccgacatggtggcgatagacgcgggttatcggatgtccgctaccccccaaaaaagaaaaagaccccacagcgcggatggaggccggggtaggtgccgccggaccccctcgcgatgggaatggacgggagcgacggggccggcgcaaaaaacgcagtatctcccgcgaaggctacccgccgccccagcccccggccaaatgcggaaacggtcccgcgctctcgcctttatacgcgggccgccctgcgacacaatcacccgtccgtggtttcgaatctacacgacaggcccgcagacgcggctaacacacacgccggcaacccagaccccagtgggttggttgcgcggtcccgtctcctggctagttcttttccccaccaccaaataatcagacgacaaccgcaggtttttgtaatgtatgtgctcgtgtttattgtggatacgaaccggggacgggaggggaaaacccagacgggggatgcgggtccggtcgcgccccctacccaccgtactcgtcaattccaagggcatcggtaaacatctgctcaaactcgaagtcggccatatccagagcgccgtagggggcggagtcgtggggggtaaatcccggacccggggaatccccgtcccccaacatgtccagatcgaaatcgtctagcgcgtcggcatgcgccatcgccacgtcctcgccgtctaagtggagctcgtcccccaggctgacatcggtcgggggggccgtcgacagtctgcgcgtgtgtcccgcggggagaaaggacaggcgcggagccgccagccccgcctcttcgggggcgtcgtcgtccgggagatcgagcaggccctcgatggtagacccgtaattgtttttcgtacgcgcgcggctgtacgcgtgttcccgcatgaccgcctcggagggcgaggtcgtgaagctggaatacgagtccaacttcgcccgaatcaacaccataaagtacccagaggcgcgggcctggttgccatgcagggtgggaggggtcgtcaacggcgcccctggctcctccgtagccgcgctgcgcaccagcgggaggttaaggtgctcgcgaatgtggtttagctcccgcagccggcgggcctcgattggcactccccggacggtgagcgctccgttgacgaacatgaagggctggaacagacccgccaactgacgccagctctccaggtcgcaacagaggcagtcaaacaggtcgggccgcatcatctgctcggcgtacgcggcccataggatctcgcgggtcaaaaatagatacaaatgcaaaaacagaacacgcgccagacgagcggtctctcggtagtacctgtccgtgatcgtggcgcgcagcatttctcccaggtcgcgatcgcgtccgcgcatgtgcgcctggcggtgcagctgccggacgctggcgcgcaggtaccggtacagggccgagcagaagttggccaacacggttcgatagctctcctcccgcgcccgtagctcggcgtggaagaaacgagagagcgcttcgtagtagagcccgaggccgtcgcgggtggccggaagcgtcgggaaggccacgtcgccgtgggcgcgaatgtcgatttgggcgcgttcggggacgtacgcgtccccccattccaccacatcgctgggcagcgttgataggaatttacactcccggtacaggtcggcgttggtcggtaacgccgaaaacaaatcctcgttccaggtatcgagcatggtacatagcgcggggcccgcgctaaagcccaagtcgtcgaggagacggttaaagagggcggcgggggggacgggcatgggcggggagggcatgagctgggcctggctcaggcgccccgttgcgtacagcggaggggccgccggggtgtttttgggacccccggccgggcgggggggtggtggcgaagcgccgtccgcgtccatgtcggcaaacagctcgtcgaccaagaggtccattgggtggggttgatacgggaaagacgatatcgggcttttgatgcgatcgtccccgcccgcccagagagtgtgggacgcccgacggcgcgggaagagaaaaacccccaaacgcgttagaggaccggacggaccttatggggggaagtgggcagcgggaaccccgtccgttcccgaggaatgacagcccgtggtcgccaccccgcatttaagcaacccgcacgggccgccccgtacctcgtgacttccccccacattggctcctgtcacgtgaaggcgaaccgagggcggctgtccaacccaccccccgccacccagtcacggtccccgtcggattgggaaacaaaggcacgcaacgccaacaccgaatgaacccctgttggtgctttattgtctgggtacggaagtttttcactcgacgggccgtctggggcgagaagcggagcgggctggggctcgaggtcgctcggtggggcgcgacgccgcagaacgccctcgagtcgccgtggccgcgtcgacgtcctgcaccacgtctggattcaccaactcgttggcgcgctgaagcaggtttttgccctcgcagaccgtcacgcggatggtggtgatgccaaggagttcgttgaggtcttcgtctgtgcgcggacgcgacatgtcccagagctggaccgccgccatccgggcatgcatggccgccaggcgcccgaccgcggcgcagaagacgcgcttgttaaagccggccacccggggggtccatggcgcgtcggggtttgggggggcggtgctaaagtgcagctttctggccagcccctgcgcgggtgtcttggatcgggttggcgccgtcgacgcgggggcgtctgggagtgcggcggattctggctgggccgatttcctgccgcgggtggtctccgccgccggggccgcgggggccttagtcgccacccgctgggttcggggggcccggggggcggtggtgggtgtgcgtccggcccctccggacccagcgggcggcggaggcgcccgcgcaggccccgggccggacaaaaccgccccggaaacgggacgccgcgtccgggggacctccgggtgttcgtcgtcttcggatgacgagcccccgtagagggcataatccgactcgtcgtactggacgaaacggacctcgcccctcgggcgcgcgcgtgtctgtagggcgccacggcgggaggtggcaggcggactatcgggactcgccatacatgaagacggggtgtagtacagatcctcgtactcatcgcgcggaacctcccgcggacccgacttcacggagcggcgagaggtcatggttccacgaacacgctagggtcggatgcgcggacaattaggcctgggttcggacggcggggggtggtgcaggtgtggagaggtcgagcgataggggcggcccgggagagaagagagggtccgcaaaacccactggggatgcgtgagtggccctctgtgggcggtgggggagagtcttataggaagtgcatataaccacaacccatgggtctaaccaatccccaggggccaagaaacagacacgccccaaacggtctcggtttccgcgaagaaggggaagtcctgggacaccctccacccccacccctcaccccacacagggcgggttcaggcgtgcccggcagccagtagcctctggcagatctgacagacgtgtgcgataatacacacgcccatcgaggccatgcctacataaaagggcaccagggcccccggggcagacatttggccagcgttttgggtctcgcaccgcgcgcccccgatcccatcgcgcccgccctcctcgccgggcggctccccgtgcgggcccgcgtctcccgccgctaaggcgacgagcaagacaaacaacaggcccgcccgacagacccttctgggggggcccatcgtccctaacaggaagatgagtcagtggggatccggggcgatccttgtccagccggacagcttgggtcgggggtacgatggcgactggcacacggccgtcgctactcgcgggggcggagtcgtgcaactgaacctggtcaacaggcgcgcggtggcttttatgccgaaggtcagcggggactccggatgggccgtcgggcgcgtctctctggacctgcgaatggctatgccggctgacttttgtgcgattattcacgcccccgcgctatccagcccagggcaccacgtaatactgggtcttatcgactcggggtaccgcggaaccgttatggccgtggtcgtagcgcctaaaaggacgcgggaatttgcccccgggaccctgcgggtcgacgtgacgttcctggacatcctggcgccccccccggccctcaccaagccgatttccctgcggcagttcccgcaactggcgcccccccctccaaccggggccgggatacgcgcagatccttggttggagggggcgctcggggacccaagcgtgactccggccctaccggcgcgacgccgagggcggtccctcgtctatgccggcgagctgacgccggttcagacggaacacggggacggcgtacgagaagccatcgccttccttccaaaacgcgaggaggatgccggtttcgacattgtcgtccgtcgcccggtcaccgtcccggcaaacggcaccacggtcgtgcagccatccctccgcatgctccacgcggacgccgggcccgcggcctgttatgtgttggggcggtcgtcgctcaacgcccgcggcctcctggtcgttcctacgcgctggctccccgggcacgtatgtgcgtttgttgtttacaaccttacgggggttcctgtgaccctcgaggccggcgccaaggtcgcccagctcctggttgcgggggcggacgctcttccttggatccccccggacaactttcacgggaccaaagcgcttcgaaactaccccaggggtgttccggactcaaccgccgaacccaggaacccgccgctcttggtgtttacgaacgagtttgacgcggaggcccccccgagcgagcgcgggaccgggggttttggctctaccggtatttagcccatagcttggggttcgttccgggcaataaaaaacgtttgtatctcatctttcctgtgtgtagttgtttctgttggaggcctgtgggtctatcacacccgcccctccatcccacaaacacagaacacacgggttggatgaaaacacgcatttattgacccaaaacacacggagctgctcgagatgggccagggcgaggtgcggttggggaggctgtaggtctgggaacggacacgcggggacacgattccggtttggggtccgggagggcgtcgccgtttcgggcggcaggcgccagcgtaacctccgggggcggcgtgtgggggtgccccaaggagggcgcctcggtcaccccaagcccccccaagcgggttcccccggcaaccccgaaggcggagaggccaagggcccgttcggcgatggccacatcctccatgaccacgtcgctctcggccatgctccgaatagcctgggagacgagcacatccgcggacttgtcagccgcccccacggacatgtacatctgcaggatggtggccatacacgtgtccgccaggcgccgcatcttgtcctgatgggccgccacggccccgtcgatcgtgggggcctcgagcccggggtggtggcgcgccagtcgttctaggttcaccatgcaggcgtggtacgtgcgggccaaggcgcgggccttcacgaggcgtcgggtgtcgtccagggaccccagggcgtcatcgagcgtgatgggggcgggaagtagcgcgttaacgaccaccagggcctcctgcagccgcggctccgcctccgagggcggaacggccgcgcggatcatctcatattgttcctcggggcgcgctccccagccacatatagccccgagaagagaagccatcgcgggcgggtactggcccttgggcgcgcggacgcaatggggcaggaagacgggaaccgcggggagaggcgggcggccgggactcccgtggaggtgaccgcgctttatgctaccgacgggtgcgttattacctcttcgatcgccctcctcacaaactctctactgggggccgagccggtttatatattcagctacgacgcatacacgcacgatggccgtgccgacgggcccacggagcaagacaggttcgaagagagtcgggcgctctaccaagcgtcgggcgggctaaatggcgactccttccgagtaaccttttgtttattggggacggaagtgggtgggacccaccaggcccgcgggcgaacccgacccatgttcgtctgtcgcttcgagcgagcggacgacgtcgccgcgctacaggacgccctggcgcacgggaccccgctacaaccggaccacatcgccgccaccctggacgcggaggccacgttcgcgctgcatgcgaacatgatcctggctctcaccgtggccatcaacaacgccagcccccgcaccggacgcgacgccgccgcggcgcagtatgatcagggcgcgtccctacgctcgctcgtggggcgcacgtccctgggacaacgcggccttaccacgctatacgtccaccacgaggcgcgcgtgctggccgcgtaccgcagggcgtattatggaagcgcgcagagtcccttctggtttcttagcaaattcgggccggacgaaaaaagcctggtgctcaccactcggtactacctgcttcaggcccagcgtctggggggcgcgggggccacgtacgacctgcaggccatcaaggacatctgcgccacctacgcgattccccacgccccccgccccgacaccgtcagcgccgcgtccctgacctcgtttgccgccatcacgcggttctgttgcacgagccagtacgcccgcggggccgcggcggccgggtttccgctttacgtggagcgccgtattgcggccgacgtccgcgagaccagtgcgctggagaagttcataacccacgatcgcagttgcctgcgcgtgtccgaccgtgaattcattacgtacatttacctggcccattttgagtgtttcagccccccgcgcctagccacgcatcttcgggccgtgacgacccacgaccccaaccccgcggccaacacggagcagccctcgcccctgggcagggaggccgtggaacaatttttttgccacgtgcgcgcccaactgaatatcggggagtacgtcaaacacaacgtgaccccccgggagaccgtcctggatggcgatacggccaaggcctacctgcgcgctcgcacgtacgcgcccggggccctgacgcccgcccccgcgtattgcggggccgtggactccgccaccaaaatgatggggcgtttggcggacgccgaaaagctcctggtcccccgcgggtggcccgcgtttgcgcccgccagtcccggggaggatacggcgggcggcacgccgcccccacagacctgcggaatcgtcaagcgcctcctgagactggccgccacggaacaacaggacaccacgcccccggcgatcgcggcgcttatccgtaatgcggcggtgcagactcccctgcccgtctaccggatatccatggtccccacgggacaggcatttgccgcgctggcctgggacgactgggcccgcataacgcgggacgctcgcctggccgaagcggtcgtgtccgccgaagcggcggcgcaccccgaccacggcgcgctgggcaggcggctcacggatcgcatccgcgcccagggccccgtgatgccccctggcggcctggatgccggggggcagatgtacgtgaatcgcaacgagatattcaacggcgcgctggcaatcacaaacatcatcctggatctcgacatcgccctgaaggagcccgtcccctttcgccggctccacgaggccctgggccactttaggcgcggggctctggctgcggttcagctcctgtttcccgcggcccgcgtggaccccgacgcatatccctgttattttttcaaaagcgcatgtcggcccggcccggcgtccgtgggttccggcagcggactcggcgacgacggggactggtttccctgctacgacgacgccggtgatgaggagtgggcggaggacccgggcgccatggacacatcccacgatcccccggacgacgaggttgcctactttgacctgtgccacgaagtcggccccacggcggaacctcgcgaaacggattcgcccgtgtgttcctgcaccgacaagatcggactgcgggtgtgcatgcccgtccccgccccgtacgtcgtccacggttctctaacgatgcggggggtggcacgggtcatccagcaggcggtgctgttggaccgagattttgtggaggccatcgggagctacgtaaaaaacttcctgttgatcgatacgggggtgtacgcccacggccacagcctgcgcttgccgtattttgccaaaatcgcccccgacgggcctgcgtgcggaaggctgctgccagtgtttgtgatcccccccgcctgcaaagacgttccggcgtttgtcgccgcgcacgccgacccgcggcgcttccattttcacgccccgcccacctatctcgcttccccccgggagatccgtgtcctgcacagcctgggtggggactatgtgagcttctttgaaaggaaggcgtcccgcaacgcgctggaacactttgggcgacgcgagaccctgacggaggtcctgggtcggtacaacgtacagccggatgcgggggggaccgtcgaggggttcgcatcggaactgctggggcggatagtcgcgtgcatcgaaacccactttcccgaacacgccggcgaatatcaggccgtatccgtccggcgggccgtcagtaaggacgactgggtcctcctacagctagtccccgttcgcggtaccctgcagcaaagcctgtcgtgtctgcgctttaagcacggccgggcgagtcgcgccacggcgcggacattcgtcgcgctgagcgtcggggccaacaaccgcctgtgcgtgtccttgtgtcagcagtgctttgccgccaaatgcgacagcaaccgcctgcacacgctgtttaccattgacgccggtacgccatgctcgccgtccgttccctgcagcacctctcaaccgtcgtcttgataacggcgtacggcctcgtgctcgtgtggtacaccgtcttcggtgccagtccgctgcaccgatgtatttacgcggtacgccccaccggcaccaacaacgacaccgccctcgtgtggatgaaaatgaaccagaccctattgtttctgggggccccgacgcacccccccaacgggggctggcgcaaccacgcccatatctgctacgccaatcttatcgcgggtagggtcgtgcccttccaggtcccacccgacgccatgaatcgtcggatcatgaacgtccacgaggcagttaactgtctggagaccctatggtacacacgggtgcgtctggtggtcgtagggtggttcctgtatctggcgttcgtcgccctccaccaacgccgatgtatgtttggtgtcgtgagtcccgcccacaagatggtggccccggccacctacctcttgaactacgcaggccgcatcgtatcgagcgtgttcctgcagtacccctacacgaaaattacccgcctgctctgcgagctgtcggtccagcggcaaaacctggttcagttgtttgagacggacccggtcaccttcttgtaccaccgccccgccatcggggtcatcgtaggctgcgagttgatgctacgctttgtggccgtgggtctcatcgtcggcaccgctttcatatcccggggggcatgtgcaatcacataccccctgtttctgaccatcaccacctggtgttttgtctccaccatcggcctgacagagctgtattgtattctgcggcggggcccggcccccaagaacgcagacaaggccgccgccccggggcgatccaaggggctgtcgggcgtctgcgggcgctgctgttccatcatcctctcgggcatcgcagtgcgattgtgttatatcgccgtggtggccggggtggtgctcgtggcgcttcactacgagcaggagatccagaggcgcctgtttgatgtatgacgtcacatccaggccggcggaaaccggaacggcatatgcaaattggaaactgtcctgtcttggggcccacccacccgacgcgtcatatgcaaatgaaaatcggtcccccgaggccacgtgtagcctggatcccaacgaccccgcccatgggtcccaattggccgtcccgttaccaagaccaacccagccagcatatccacccccgcccgggtccccgcggaagcggaacggtgtatgtgatatgctaattaaatacatgccacgtacttatggtgtctgattggtccttgtctgtgccggaggtggggcgggggccccgcccggggggcggaacgaggaggggtttgggagagccggccccggcaccacgggtataaggacatccaccacccggccggtggtggtgtgcagccgtgttccaaccacggtcacgcttcggtgcctctccccgattcgggcccggtcgctcgctaccggtgcgccaccaccagaggccatatccgacaccccagccccgacggcagccgacagcccggtcatggcgactgacattgatatgctaattgacctcggcctggacctctccgacagcgatctggacgaggacccacccgagccggcggagagccgccgcgacgacctggaatcggacagcagcggggagtgttcctcgtcggacgaggacatggaagacccccacggagaggacggaccggagccgatactcgacgccgctcgcccggcggtccgcccgtctcgtccagaagaccccggcgtacccagcacccagacgcctcgtccgacggagcggcagggccccaacgatcctcaaccagcgccccacagtgtgtggtcgcgcctcggggcccggcgaccgtcttgctcccccgagcagcacgggggcaaggtggcccgcctccaacccccaccgaccaaagcccagcctgcccgcggcggacgccgcgggcgtcgcaggggtcggggtcgcggtggtcccggggccgccgatggtttgtcggacccccgccggcgtgcccccagaaccaatcgcaacccggggggaccccgccccggggcggggtggacggacggccccggcgccccccatggcgaggcgtggcgcggaagtgagcagcccgacccacccggaggcccgcggacacggggcgtgcgccaagcaccccccccgctaatgacgctggcgattgcccccccgcccgcggacccccgcgccccggccccggagcgaaaggcgcccgccgccgacaccatcgacgccaccacgcggttggtcctgcgctccatctccgagcgcgcggcggtcgaccgcatcagcgagagctttggccgcagcgcacaggtcatgcacgacccctttggggggcagccgtttcccgccgcgaatagcccctgggccccggtgttggcgggccaaggagggccctttgacgccgagaccagacgggtctcctgggaaaccttggtcgcccacggcccgagcctctatcgcacttttgccggcaatcctcgggccgcatcgaccgccaaggccatgcgcgactgcgtgctgcgccaagaaaatttcatcgaggcgctggcctccgccgacgagacgctggcgtggtgcaagatgtgcatccaccacaacctgccgctgcgcccccaggaccccattatcgggacggccgcggctgtgctggataacctcgccacgcgcctgcggccctttctccagtgctacctgaaggcgcgaggcctgtgcggcctggacgaactgtgttcgcggcggcgtctggcggacattaaggacattgcatccttcgtgtttgtcattctggccaggctcgccaaccgcgtcgagcgtggcgtcgcggagatcgactacgcgacccttggtgtcggggtcggagagaagatgcatttctacctccccggggcctgcatggcgggcctgatcgaaatcctagacacacaccgccaggagtgttcgagtcgtgtctgcgagttgacggccagtcacatcgtcgcccccccgtacgtgcacggcaaatatttttattgcaactccctgttttaggtacaataaaaacaaaacatttcaaacaaatcgccccacgtgttgtccttctttgctcatggccggcggggcgtgggtcacggcagatggcgggggtgggcccggcgtacggcctgggtgggcggagggaactaacccaacgtataaatccgtccccgctccaaggccggtgtcatagtgcccttaggagcttcccgcccgggcgcatccccccttttgcactatgacagcgacccccctcaccaacctgttcttacgggccccggacataacccacgtggcccccccttactgcctcaacgccacctggcaggccgaaacggccatgcacaccagcaaaacggactccgcttgcgtggccgtgcggagttacctggtccgcgcctcctgtgagaccagcggcacaatccactgctttttctttgcggtatacaaggacacccaccacacccctccgctgattaccgagctccgcaactttgcggacctggttaaccacccgccggtcctacgcgaactggaggataagcgcggggtgcggctgcggtgtgcgcggccgtttagcgtcgggacgattaaggacgtctctgggtccggcgcgtcctcggcgggagagtacacgataaacgggatcgtgtaccactgccactgtcggtatccgttctcaaaaacatgctggatgggggcctccgcggccctacagcacctgcgctccatcagctccagcggcatggccgcccgcgcggcagagcatcgacgcgtcaagattaaaattaaggcgtgatctccaacccccccatgaatgtgtgtaaccccccaaaaaaataaacagccgtaacccaatcaaaccaggcgtggtgtgagtttgtggacccaaagccctcagagacaacgcgacaggccagtatggaccgtgatacttttatttattaactcacaggggcgcttaccgccacaggaataccagaataatgaccaccactatcgcgaccaccccaaatacagcatggcgccccaccacgccacaacagccctgtcgccggtatggggcatgatcagacgagccgcgagccgcgcgttgggccctgtacagctcgcgcgaattgaccctaggaggccgccacgcgcccgagttttgcgttcgtcgctggtcgtcgggcgccaaagccccggacggctgttcggtcgaacgaacggccacgacagtggcataggttggggggtggtccgacatagcctcggcgtacgtcgggaggcccgacaagaggtcccttgagatgtcgggtggggccacaagcctggtttccggaagaaacaggggggttgccaataacccgccagggccaaaactccggcgctgcgcacgtcgttcggcgcggcgccgggcgcgccgagcggctcgctgggcggcttggcgtgagcggccccgctccgacgcctcgccctctccggaggaggttggcggaattggcacggacgacaggggcccagcagagtacggtggaggtgggtccgtgggggtgtccagatcaataacgacaaacggcccctcgttcctaccagacaagctatcgtaggggggcgggggatcagcaaacgcgttccccgcgctccatagacccgcgtcgggttgcgccgcctccgaagccatggatgcgccccaaagccacgactcccgcgcgctaggtccttggggtaagggaaaaggccctactccccatccaagccagccaagttaacgggctacgccttcggggatgggactggcaccccggcggattttgttgggctggtacgcgttgcccaaccgagggccgcgtccacgggacgcgccttttataaccccgggggtcattcccaacgatcacatgcaatctaactggctcccctctccccccctctcccctctccccccctctcccctctccccccctctcccctctccccccctctcccctctccccccctctcccctctccccccctctcccctctccccccctctcccctctccccccctctcccctctccccccctctcccctctccccccctctcccctctccccccctgctctttccccgtgacacccgacgctggggggcgtggctgccgggaggggccgcggatgggcggggcctactcggtctcccgcccccgcccccgaaccgccccgccggccttgcccccctttgatcccctgctacccccaacccgtgctcgtggtgcgggttgggtggggggggggagtgtgggcgggggtgtgcgggaggtgtcggtggtggtggtggtggtaggaatggtggtgaggggggggggcgctggttggtcaaaaaagggagggacgggggccggcagaccgacggcgacaacgctccccggcggccgggtcgcggctcttacgagcggcccggcccgcgctcccaccccccgggccgtgtccttgctttccccccgtctccccccccctccttctcctcctcctcctcctcgtttttccaaaccccgcccacccggcccggcccggcccggccaccgccgcccacccacccacctcgggagacccagccccggtcccccgttccccgggggccgttatctccagcgccccgtccggcgcgccgccccccgccgctaaaccccatcccgcccccgggaccccacatataagcccccagccacacgcaagaacagacacgcagaacggctgtgtttatttaaataaaccgatgtcggaataaacaaacacaaacacccgcgacggggggacggagggaggggggtgacgggggacgggaacagccacaaaaaacacccacaaaaaaaaacagccacccccgacacccccccccacccccagtctcttcgccttttcccccccaccccacgcccccactgagcccggtcgatcgacgagcacccccgcccccgcccctgccccggcgacccccggcccgcacgatcccgacaacaataacaaccccaacggaaagcggcggggtgtgggggggggcgaggaacaaccgaggggaacgggggatggaaggacgggaagtggaagtcctgatacccatcctacacccccctgccttccaccctccggccccccgcgagtccacccgccggccggctaccgagaccgaacacggcggccgccgcagccgccgcagccgccgccgacaccgcagagccggcgcgcgcacacacaagcggcagaggcagaaaggcccagagtcattgtttatgtggccgcgggccagcagacggcccgcgacacccccccccccgcccgtgtgggtatccggccccccgccccgcgccggtccattaagggcgcgcgtgcccgcgagatatcaatccgttaagtgctctgcagacaggggcaccgcgcccggaaatccattaggccgcagacgaggaaaataaaattacatcacctacccacgtggtgctgtggcctgtttttgctgcgtcatctgagcctttataaaagcgggggcgcggccgtgccgatcgcgggtggtgcgaaagactttccgggcgcgtccgggtgccgcggctctccgggcccccctgcagccggggcggccaaggggcgtcggcgacatcctccccctaagcgccggccggccgctggtctgttttttgttttccccgtttcgggggtggggggggttgcggtttctgtttctttaacccgtctggggtgtttttcgttccgtcgccggaatgtttcgttcgtctgtcccctcacggggcgaaggccgcgtacggcccgggacgagggggcccccgaccgcggcggtccgggccccgtccgggcccgctcgccggcacgcgacgcgaaaaaggccccccggaggcttttccgggttcccggcccggggcctgagataaacaatcggggttaccgccaacggccggcccccgtggcggcccggcccggggccccggcggacccaaggggccccggcccggggccccacaacggcccggcgcatgcgctgtggtttttttttctcggtgttttgtcgggctccgtcgcctttcctgttctcgcttctccccccccccccttcttcacccccagtaccctcctccctcccttcctcccccgttatcccactcgtcaagggcgccccggtgtggttcaacaaagacgccgcgtttccaggtaggttagacacctgcttctccccaatagaggggggggacccaaacgacagggggcgccccagaggctaaggtcggccacgccactcgcgggtgggctcgtgttacagcacaccagcccgttcttttccccccctcccacccttagtcagactctgttacttacccgtccgaccaccaactgcccccttatctaagggccggctggaagaccgccagggggtcggccggtgtcgctgtaaccccccacgccaatgacccacgtactccaagaaggcatgtgtcccaccccgcctgtgtttttgtgcctggctctctatgcttgggtcttactgccgggggggggggagtgcgggggagggggggtgtggaaggaaatgcacggcgcgtgtgtaccccccctaaagttgttcctaaagcgaggatatggaggagtggcgggtgccgggggaccggggtgatctctggcacgcgggggtgggaagggtcgggggaggggggatggggtaccggcccacctggccgacgcgggtgcgcgtgcctctgcacaccaaccccacgtcccccggcggtctctaagaagcaccgccccccctccttcataccaccgagcatgcctgggtgtgggttggtaaccaacacgcccatcccctcgtctcctgtgattctctggctgcaccgcattcttgttttctaactatgttcctgtttctgtctccccccccacccctccgccccaccccccaacacccacgtctgtggtgtggccgacccccttttgggcgccccgtcccgccccgccacccctcccgtcctttgttgccctatagtgtagttaacccccccccgccctttgtggcggccagaggccaggtcagtccgggcgggcaggcgctcgcggaaacttaacacccacacccaacccactgtggttctggctccatgccagtggcaggatgctttcggggatcggtggtcaggcagcccgggccgcggctctgtggttaacaccagagcctgcccaacatggcacccccactcccacgcacccccactcccacgcacccccactcccacgcacccccactcccacgcacccccactcccacgcacccccactcccacgcacccccactcccacgcacccccactcccacgcacccccactcccacgcacccccgagatccatccaacacagacagggaaaagatacaaaagtaaacctttatttcccaatagacagcaaaaatcccctgagttttttattagggccaacactaaagacccgctggtgtgtggtgcccgtgtctttcacttttcccctccccgacacggattggctggtgtagtgggcgcggccagagaccacccagcgcccgacccccccctccccacaaacacggggggcgtcccttattgttttccctcgtcccgggtcgacgccccctgctccccggaccacgggtgccgagaccgcaggctgcggaagtccagggcgcccactagggtgccctggtcgaacagcatgttccccacgggggtcatccagaggctgttccactccgacgcgggggccgtcgggtactcggggggcatcacgtggttacccgcggtctcggggagcagggtgcggcggctccagccggggaccgcggcccgcagccgggtcgccatgtttcccgtctggtccaccaggaccacgtacgccccgatgttccccgtctccatgtccaggatgggcaggcagtcccccgtgatcgtcttgttcacgtaaggcgacagggcgaccacgctagagacccccgagatgggcaggtagcgcgtgaggccgcccgcgggggcggccccggaagtctccgcgtggcgcgtcttccgggcacacttcctcggcccccgcggcccagaagcagcgcgggggccgagggaggtttcctcttgtctccctcccagggcaccgacggccccgcccgaggaggcggaagcggaggaggacgcggccccggcggcggaagaggcggcccccgcgggagtcggggccgaggaggaagaggcagaggaggaagaggcggaggccgccgaggacgtcaggggggtcccgggcccaccctggccgcgcccccccggccctgagtcggagggggggtgcgtcgccgccctcttggcccctgccggcgcgagggggggacgcgtggactggggggaggggttttcctggcccgacccgcgcctcttcctcggacgcaccgccgcctcctgctcgacagaggcggcggaggggagcgggggggcgccggagggggcggcgccgcgggagggcccgtgtccaccctccacgcccggcccccccgagccgcgcgccaccgtcgcacgcgcccggcacagactctgttcttggttcgcggcctgagccagggacgagtgcgactggggcacacggcgcgcgtccgcgggggccggggcgcgggggccgggccccggaggcggcgctcgcacgcacggggccacggccgcgcgggggcgcgcgggtcccgacgcggccgaggacgcggtgggcccggggcggggggcggagcctggcatgggcgccgcggggggcctgtggggagaggccgggggggagtcgctgatcactatggggtctctgttgtttgcaaggggggcgggtctgttgacaagggggcccgtccggcccctcggccgccccgcctccgcttcaacaaccccaaccccaaccccaacccccccggaggggccagacgccccccgcggcgccgcggctcgcgactggcgggagccgccgccgccgccgctgctgttggtggtggtgttggtgttactgctgccgtgtggcccgatgggcgccgaggggggcgctgtccgagccgcggccggctggggggctgcgtgagacgccccgcccgtcacggggggcgcggcggcgcctctgcgtgggggggcgcggggcgtccggcggggggcgggcggtacgtagtctgctgcaagagacaacggggggcgcgatcaggttacgccccctcccaggccctccctttccgcgcccgccctttcctcgcccccccgcccgcctattcctccctcccccctcctcctcctcctcccccagggtcctcgccgcccccccgcctcaccgtcgtccaggtcgtcgtcatcctcgtccgtggtgggctcagggtgggtgggcgacagggccctcaccgtgtgcccccccagggtcaggtaccgcggggcgaaccgctgattgcccgtccagataaagtccacggccgtgcccgccctgacggcctcctcggcctccatgcgggtctgggggtcgttcacgatcgggatggtgctgaacgacccgctgggcgtcacgcccactatcaggtacaccagcttggcgttgcacagcgggcaggtgttgcgcaattgcatccaggttttcatgcacgggatgcagaagcggtgcatgcacgggaaggtgtcgcagcgcaggtggggcgcgatctcatccgtgcacacggcgcacacgtcgccctcgtcgctccccccgtcctctcgagggggggcgcccccgcaactgccggggtcttcctcgcggggggggctcccccccgagaccgcccccccatccacgccctgcggccccagcagccccgtctcgaacagttccgtgtccgtgctgtccgcctcggaggcggagtcgtcgtcatggtggtcggcgtccccccgcccccccacttcggtctccgcctcagagtcgctgctgtccggcaggtctcggtcgcagggaaacacccagacatccggggcgggctaaggggaaaaaaaggggggcgggtaagaatggggggatttcccgcgtcaatcagcgcccacgagttccccctctccccccccccgcctcacaaagtcctgcccccctgctggcctcggaagaggggggagaaaggggtctgcaaccaaaggtggtctgggtccgtcctttggatcccgacccctcttcttccctcttctcccgccctccagacgcaccggagtcgggggtcccacggcgtcccccaaatatggcgggcggctcctccccacccccctagatgcgtgtgagtaagggggccctgcgtatgagtcagtggggaccacgccccctaacacggcgaccccggtccctgtgtgtttgttgtgggggcgtgtctctgtgtatgagtcagggggtcccacggcgaccccgggccctgcgtctgagtcaaaggggccatgtgtatgtgttggggggtctgtatatataaagtcagggggtcacatggcgacccccaacagggcgaccccggtccctgtatatatagggtcagggggttccgcgccccctaacatggcgcccccggtccctgtatatatagtgtcacggggttccacgccccctaacatggcgcccggctcccgtgtatgagtgggggtcccccaacatggcggccggttccagtgtaagggtcgggggtcccccaacatggcgccccccaatatggcgccccccaatatggcgccccagacatggcgcccggcccctcacctcgcgctgggggcggccctcaggccggcgggtactcgctccggggcggggctccatgggggtcgtatgcggttggagggtcgcggacggagggtccctgggggtcgcaacgtaggcggggcttctgtggtgatgcggagagggggcggcccgagtctgcctggctgctgcgtctcgctccgagtgccgaggtgcaaatgcgaccagactgtcgggccagggctaacttataccccacgcctttcccctccccaaaggggcggcagtgacgattcccccaatggccgcgcgtcccaggggaggcaggcccaccgcggggcggccccgtccccggggaccaacccggcgcccccaaagaatatcattagcatgcacggcccggcccccgatttgggggaccaacccggtgtcccccaaagaaccccattagcatgcccctcccaccgacgcaacaggggcttggcctgcgtcggtgccccggggcttcccgccttcccgaagaaactcattaccatacccggaaccccaggggaccaatgcgggttcattgagcgacccgcgggccaatgcgcgaggggccgtgtgttccgccaaaaaagcaattagcataacccggaaccccaggggagtggttacgcgcggcgcgggaggcggggaataccggggttgcccattaagggccgcgggaattgccggaagcgggaagggcggccggggccgcccattaatgagtttctaattaccataccgggaagcggaacaaggcctcttgcaagtttttaattaccataccgggaagtgggcggcccggcccattgggcggtaactcccgcccaatgggccgggccccgaagactcggcggacgctggttggccgggccccgccgcgctggcggccgccgattggccagtcccgcccccgaggcggcccgccctgtgagggcgggctggctccaagcgtatatatgcgcggctcctgccatcgtctctccggatctagagatctccggaattaattcgccctatagtgagtcggaattttaaccgccaccgccagagccacctccacctgacccgccgcctcctagatcttcttctgagatgagtttttgttctgaattcccagatccttccgtggacagtgtctggaactcgtgcactttgctgccggctccctggccctcctgcgtcagcgcctgcacctgcaccaggtacgtggtatccggagcaaggtcatccagggtcacggagaagccttccgtgcggcgcacattatagctgttggcatcccccttcttgcggtaggtgacttcgtacttccacacacggctctgctgtgacaccgggatgctccaggtgacactcagggaggtggtgcttcggtcctccagcctcactttggggggctctgtttggttaatactgacgctggcagtccggaagcttcggctagtcaccaggcctgagacaccattgcgtgcttcgacagcgaaggtatagttcatgtggggctccaggtcactgactgtcacactcgtgcgggtcagggcgtgaggaggttctgaatagcgcacgctcgcctcacagggcccacactcgccagactctggccagcactgttcgcaagtgacactgtagacaatgtcctggcggccaccagtgtccttgggagctgtccaacgcagttctactttggcacccatgccaatggccgtgaggtagttgggggcagagggtggacgtgtgcaagacatggacagtgggtcctcaggtgccctgaaatagccttcttcacactggcaggaggtggcaccctctgtggatggcagggtatgctctggacactccaggcaagggctctcagatgcctcagacttgaagaatcctggagaacaggctcggcaggcatcctcgaccttctcgtagccttcctggcacaggcactgcccgatgggcaccagccactcgccatccaccgtgcagtgcatgagaggcccctcgcccccataaggcaccacggcatggtccacgcaggtaccggccaccgtggccaggggttgtgtatcggagacagcgacagcaatggtctcggggaagcgagccaagctctgcagcatctcgggacacttcttgtagtagacgcgaacggagagcagcgccacgcaggcgccgatgtcctggaaggccaggtagaagcccttccgggtaaggggccccaccatgcgctcctctacgttcagcttgacattgcgagcctcgaagtcactgctgaccgtgatctcgtcaggggcgatggtgtcaatcttggtgaactggcgcttctggaagttggtgccatagtccacatctgactctgcatagtagaggttgaaggtctctttgcatgagctggcgccacccgggaagctgttacagtctcgcaccgtgaacttgagctcaataaagatgcgctcggcctcctcccggtacacccagttggtgcggagccagttgtcctggtcgccggataccacgttgcacaccgagtacatgtagataggcatgtcgtccatgatgttctgcatcaggtcccaccctttgccataggggtgcgtgagccagccgagctctcccttcattgctgcgaagtccaacaaaacaacttcctttccctgtgccgccgcggccgccagcgcgcaaccccacagcagcgccaggcagaaaccgactgcccggagctccatggtcgacccgggatccggtaccactttgtgcggccagcttcctaggagatcctctagctagagtcggtgtcttctatggaggtcaaaacagcgtggatggcgtctccaggcgatctgacggttcactaaaccagctctgcttatatagagctcggggagcagaagcgcgcgaacagaagcgagaagcgaactgattggttagttcaaataaggcacagggtcatttcaggtccttggggcaccctggaaacatctgatggttctctagaaactgctgagggcgggaccgcatctggggaccatctgttcttggccctgagcggggcaggaactgcttaccacagatatcctgtttggcccatattctcctgttccaactgttcttggccctgagcggggcaggaactgcttaccacagatatcctgtttggcccatattctcctgtttctctgttcctgaccttgatcctagcttgccaaacctacaggtggggtctttcattcccataggcggttacctgggactgtgcggttgggacggcgcccgtgggcccgggcggccgggggcggcgggggccgcgatggcggcggcggcgggccatggagacagagagcgtgccggggtggtagagtttgacaggcaagcatgtgcgtgcagaggcgagtagtgcttgcctgtctaactcgctcgtctcggccgcggggggcccgggctgcgccgccgcgctttaaagggccgcgcgcgacccccggggggtgtgtttcggggggggcccgttttccgctcctccccccgctcctccccccgctcctccccccgctcctccccccgctcctccccccgctcctccccccgctcctccccccgctcctccccccgctcctccccccgctcctccccccgctcctccccccgctcctccccccgctcctccccccgctcctccccccgctcctccccccgctcctccccccgctcctccccccgctcctccccccgctccccaacgcccgccgcgcgcgcgcacgccgcccggaccgccgcccgccttttttgcgcgccgccccgcccgcggggggcccgggctgccacaggtgtaacaacaccaacagaacaccaacagcacggcgcaccggcgactccggttcctcatccacacgtcacacgtcacgtcatccaccacacctgcccaccaacacaactcacagcgacaactcaccgcgcaacaactcctgttcctcatccacacgtcaccgcgcaccccccgctcctccagacgtcccccagcgcaacacgccgctcctgtcacacaccaccgccccagccctccccagccccagccctccccagccccagccctccccggccccagccctccccggccccagccctccccggccccagccctccccggccccagccctccccggccccagccctccccggccccagccctccccggccgcgtcccgcgctccctcgggggggttcgggcatctctacctcagtgccgccaatctcaggtcagagatccaaaccctccgggggcgcccgcgcaccaccaccgcccctcgccccctcccgcccctcgccccctcccgcccctcgccccctcccgcccctcgccccctcccgcccctcgccccctcccgcccctcgccccctcccgcccctcgccccctcccgcccctcgccccctcccgcccctcgccccctcccgcccctcgccccctcccgcccctcgccccctcccgcccctcgccccctcccgcccctcgccccctcccgcccctcgccccctcccgcccctcgccccctcccgcccctcgccccctcccgcccctcgccccctcccgcccctcgccccctcccgcccctcgccccctcccgcccctcgaaataaacaacgctactgcaaaactaaatcaggtcgttgtcgtttattgcgtcttcgggtttcgcaagcgccccgccccgtcccggcccgttacagcaccccgtccccctcgaacgcgccgccgtcgtcgtcgtcccaggcgccttcccagtccacaacttcccgtcgcgggggcgtggccaagcccgcctccgcccccagcacctccacggcccccgccgccgccagcacggtgccgctgcggcccgtggccgaggcccagcgaatcccgggcaacgccggcggcagggcccccgggccgtcgtcgtcgtcgtcgccgccgcgcagcaccagcgggggggcgtcgtcgtcgggctccagcagggcgcgggcgcaaaagtccctccgcggcccgcgccaccgggccgggccggcgcgcaccgcctcgcgccccagcgccacgtacacgggccgcagcggcgcgcccaggccccagcgcgcgcaggcgcggtgcgagtgggcctcctcctcgcagaagtccggcgcgccgggcgccatggcgtcggtggtccccgaggccgccgcccggccgtccagcgccggcagcacggcccggcggtactcgcgcggggacatgggcaccggcgtgtccgggccgaagcgcgtgcgcacgcggtagcgcacgttgccgccgcggcacaggcgcagcggcggcgcgtcggggtacaggcgcgcgtgcgcggcctccacgcgcgcgaagacccccgggccgaacacgcggcccggggccagcaccgtgcggcgcaggtcccgcgccgccggccagcgcacggcgcactgcacggcgggcagcaggtcgcacgccaggtaggcgtgctgccgcgacaccgcgggcccgtcggcgggccagtcgcaggcgcgcacggtgttgaccacgatgagccgccggtcgccggcgctggcgagcagccccagaaactccacggccccggcgaaggccaggtcccgcgtggacagcagcagcacgccctgcgcgcccagcgccgacacgtcgggggcgccggtccagttgcccgcccaggcggccgtgtccggcccgcacagccggttggccagggccgccagcaggcaggacagcccgccgcgctcggcggaccactccggcggcccccccgaggccccgccgccggccaggtcctcgcccggcagcggcgagtacagcaccaccacgcgcacgtcctcggggtcggggatctggcgcatccaggccgccatgcggcgcagcgggcccgaggcgcgcagggggccaaagaggcggcccccggcggccccgtgggggtgggggttatcgtcgtcgtcgccgccgccgcacgcggcctgggcggcggcggcgggcccggcgcaccgcgcggcgatcgaggccagggcccgcgggtcaaacatgagggccggtcgccaggggacggggaacagcgggtggtccgtgagctcggccacggcgcgcggggagcagtaggcctccagggcggcggccgcgggcgccgccgtgtggctgggccccgggggctgccgccgccagccgcccagggggtcggggccctcggcgggccggcgcgacagcgccacggggcgcgggcgggcctgcgccgcggcggcccggggcgccgcgggctgggcgggggcgggctcgggccccgggggcgtggaggggggcgcggggaggggggcgcgggcgtccgagccgggggcgtccgcgccgctcttcttcgtcttcgggggtcgcgggccgccgcctccgggcggccgggccgggccgggactcttgcgcttgcgcccctcccgcggcgcggcggaggcggcggcggccgccagcgcgtcggcggcgtccggtgcgctggcggccgccgccagcagggggcgcaggctctggttctcaaacagcaggtccgcggcggcggcggccgcggagctcggcaggcgcgggtcccgcggcagcgcggggcccagggccccggcgaccaggctcacggcgcgcacggcggccacggcggcctcgctgccgccggccacgcgcaggtccccgcgcaggcgcatgagcaccagcgcgtcgcgcacgaaccgcagctcgcgcagccacgcgcgcaggcggggcgcgtcggcgtgcggcggcggcggggaagcggggcccgcgggtccctccggccgcggggggctggcgggccgggccccggccagccccgggacggccgccaggtcgccgtcgaagccctcggccagcgcctccaggatcccgcggcaggcggccaggcactccacggccacgcggccggcctgggcgcggcgcccggcgtcgtcgtcggcgtcggcgtggcgggcggcgtcggggtcgtcgccccccgcgggggaggcgggcgcggcggacagccgccccagggcggcgaggatccccgcggcgccgtacccggcgggcaccgcgcgctcgcccggtgcggcggcggcggcgacgacggcggcggcgaccccctcgtcatctgcgccggcgccggggctccccgcggcccccgtcagcgccgcgttctcgcgcgccaacaggggcgcgtaggcgcggcgcaggctggtcagcaggaagcccttctgcgcgcggtcgtatcggcggctcatggccacggcggccgccgcgtgcgccaggccccagccgaagcggccggccgccatggcgtagcccaggtggggcacggcccgcgccacgctgccggtgatgaaggagctgctgttgcgcgcggcgcccgagatccggaagcaggcctggtccagcgccacgtccccggggaccacgcgcgggttctggagccaccccatggcctccgcgtccggggtgtacagcagccgcgtgatcagggcgtactgctgcgcggcgtcgcccagctcgggcgcccacacggccgccggggcgcccgaggcctcgaaccggcgtcgcgcctcctccgcctcgggcgccccccagaggcccgggcggctgtcgcccaggccgccgtacagcacccgccccgggggcgggggcccggcgccgggccacggctccccgctgacgtacccgtcgcgatagcgcgcgtagaaggcgccggaggccgcgtcggcgtccagctcgacccgccggggctgcccggccgtgaagcggcccgtggcgtcgcggccggccaccgccgcgcgggcccggcggcgctcgatgcggcccgcggaggccgcgggggtcctcgccgccgcccggggcttgggcgcggcctcggagagggggggtggcccgggcgggggcggcgtccgcccgggggcttccggcgccgcgctcgacggaccccgcccgacggcccgcgcctcgcgtgcgcggtcggccgcgtcgttgccgtcgtcgtcctcgtcctcgtcggacgacgaggacgaagaggatgcggacgacgaggacgaggacccggagtccgacgaggtcgatgacgccgatggccgccgccggccgtgacgacgtctccgcggcggctgggccggcgggcgcggcgacaggcggtccgtggggtccggatacgcgccgcgtagcggggcctcccgtgcgcggccccgggccggggcccggtcgccggcggcgtcggctgcgtcgtcgtactcgtccccgtcatcgtcgtcggctcgaaaggcgggggtccggggcggcgaggccgcggggtcgggcgtcgggatcgtccggacggcctcctctaccatggaggccagcagggccagctgtcgcggcgagacggcgtccccggcgtcctcgccggcgtcggtgcccgccgcgggggccctcccgtcccgccgggcgtcgtcgaggtcgtgggggtggtcggggtcgtggtcggggtcgtccccgccctcctccgtctccgcgccccacccgagggccccccgctcgtcgcggtctgggctcggggtgggcggcggcccgtcggtggggcccggggagccggggcgctgcttgttctccgacgccatcgccgatgcggggcgatcctccggggatacggctgcgacggcggacgtagcacggtaggtcacctacggactctcgatggggagggggcgagacccacggaccccgacgacccccgccgtcgacgcggaactagcgcggaccggtcgatgcttgggtgggaaaaaggacagggacggccgatccccctcccgcgcttcgtccgcgtatcggcgtcccggcgcggcgagcgtctgacggtctgtctctggcggtcccgcgtcgggtcgtggatccgtgtcggcagccgcgctccgtgtggacgatcggggcgtcctcgggctcatatagtcccaggggccggcgggaaggaggagcagcggaggccgccggccccccgccccccaggcgggcccgccccgaacggaattccattatgcacgaccccgccccgacgccggcacgccgggggcccgtggccgcggcccgttggtcgaacccccggccccgcccatccgcgccatctgccatgggcggggcgcgagggcgggtgggcccgcgccccgccccgcatggcatctcattaccgcccgatccggtggtttccgcttccgttccgcatgctaacgaggaacgggccgggggcggggcccgggccccgacttcccggttcggcggtaatgagatacgagccccgcgcgcccgttggccgtccccgggcccccggtcccgcccgccggacgttgggaccaacgggacggcgggcggcccaagggccgcccgccttgccgcccccccattggccggcgggcgggaccgccccaagggggcggggccgccgggtaaaagaagtgagaacgcgaagcgttcgcacttcgtcccaatatatatatattattagggcgaagtgcgagcactggcgccgtgcccgactccgcgccggccccgggggcgggcccgggcggcggggggcgggtctctccggcgcacataaaggcccggcgcgaccgacgcccgcagacggcgccggccacgaacgacgggagcggctgcggagcacgcggaccgggagcgggactcgcagagggccgtcggagcggacggcgtcggcatcgcgacgccccggctcgggatcgggatcgcatcggaaagggacacgcggaaagacccacccaccccacccacgaaacacaggggacgcaccccgggggcctccgacgacagaaacccaccggtccgcctttgtgcacgggtaagcaccttgggtgggcggaggagggggggacgcgggggcggaggaggggggacgcgggggcggaggaggggggacgcgggggcggaggaggggggacgcgggggcggaggaggggggacgcgggggcggaggagggggctcacccgcgttcgtgccttcccgcaggaggaacgtcctcgtcgaggcgaccggcggcgaccgttgcgtggaccgcttcctgctcgtcgggcggggggaagccactgtggtcctccgggacgttttctggatggccgacatttccccaggcgcttttgcgccttgtgtaaaagcgcggcgtcccgctctccgatccccgcccctgggcacgcgcaagcgcaagcgcccttcccgccccctctcatcggagtctgaggtagaatccgatacagccttggagtctgaggtcgaatccgagacagcatcggattcgaccgagtctggggaccaggatgaagccccccgcatcggtggccgtagggccccccggaggcttggggggcggttttttctggacatgtcggcggaatccaccacggggacggaaacggatgcgtcggtgtcggacgaccccgacgacacgtccgactggtcttatgacgacattcccccacgacccaagcgggcccgggtaaacctgcggctcacgagctctcccgatcggcgggatggggttatttttcctaagatggggcgggtccggtctacccgggaaacgcagccccgggcccccaccccgtcggccccaagcccaaatgcaatgctacggcgctcggtgcgccaggcccagaggcggagcagcgcacgatggacccccgacctgggctacatgcgccagtgtatcaatcagctgtttcgggtcctgcgggtcgcccgggacccccacggcagtgccaaccgcctgcgccacctgatacgcgactgttacctgatgggatactgccgagcccgtctggccccgcgcacgtggtgccgtttgctgcaggtgtccggcggaacctggggcatgcacctgcgcaacaccatacgggaggtggaggctcgattcgacgccaccgcggaacccgtgtgcaagcttccttgtttggagaccagacggtacggcccggagtgtgatcttagtaatctcgagattcatctcagcgcgacaagcgatgatgaaatctccgatgccaccgatctggaggccgccggttcggaccacacgctcgcgtcccagtccgacacggaggatgccccctcccccgttacgctggaaaccccagaaccccgcgggtccctcgctgtgcgtctggaggatgagtttggggagtttgactggaccccccaggagggctcccagccctggctgtctgcggtcgtggccgataccagctccgtggaacgcccgggcccatccgattctggggcgggtcgcgccgcagaagaccgcaagtgtctggacggctgccggaaaatgcgcttctccaccgcctgcccctatccgtgcagcgacacgtttctccggccgtgagtccggtcgccccgacccccttgtatgtccccaaataaaagaccaaaatcaaagcgtttgtcccagcgtcttaatggcgggaagggcggagagaaacagaccacgcgtacatggggggtgtttgggggtttattgacatcggggctacagggtggtaaccggatagcagatgtgaggaagtctgggccgttcgccgcgaacggcgatcagagggtccgtttcttgcggaccacggcccggtgatgtgggttgctcgtctgggatctcgggcatgcccatacacgcacaacacggacgccgcaccggatgggacgtcgtaagggggcctggggtagctgggtggggtttgtgcagagcaatcagggaccgcagccagcgcatacaatcgcgctcccgtccgtttgtcccgggcagtaccacgccgtactggtattcgtaccggctgagcagggtctccagggggtggttgggggccgcggggaacggggtccacgccacggtccactcgggcaaaaaccgagtcggcacggcccacggttctcccacccacgcgtctggggtcttgatggcgataaatcttaccccgagccggattttttgggcgtattcgagaaacggcacacacagatccgccgcgcctaccacccacaagtggtagaggcgaggggggctgggttggtctcggtgcagcagtcggaagcacgccacggcgtccacgacctcggtgctctccaaggggctgtcctccgcaaacaggcccgtggtggtgtttggggggcagcgacaggacctagtgcgcacgatcgggcgggtgggtttgggtaagtccatcagcggctcggccaaccgtcgaaggttggccggacgaacgacgaccggggtacccaggggttctgatgccaaaatgcggcactgcctaagcaggaagctccacagggccgggcttgcgtcgacggaagtccggggcagggcgttgttctggtcaaggagggtcattacgttgacgacaacaacgcccatgttggtatattacaggcccgtgtccgatttggggcacttgcagatttgtaaggccacgcacggcggggagacaggccgacgcgggggctgctctaaaaatttaagggccctacggtccacagacccgccttcccgggggggcccttggagcgaccggcagcggaggcgtccgggggaggggagggtgatttacgggggggtaggtcagggggtgggtcgtcaaactgccgctccttaaaaccccggggcccgtcgttcggggtgctcgttggttggcactcacggtgcggcgaatggcctgtcgtaagttttgtcgcgtttacgggggacagggcaggaggaaggaggaggccgtcccgccggagacaaagccgtcccgggtgtttcctcatggccccttttataccccagccgaggacgcgtgcctggactccccgcccccggagacccccaaaccttcccacaccacaccacccggcgatgccgagcgcctgtgtcatctgcaggagatcctggcccagatgtacggaaaccaggactaccccatagaggacgaccccagcgcggatgccgcggacgatgtcgacgaggacgccccggacgacgtggcctatccggaggaatacgcagaggagctttttctgcccggggacgcgcccggtccccttatcggggccaacgaccacatccctcccccgtgtggcgcatctccccccggtatacgacgacgcagccgggatgagattggggccacgggatttaccgcggaagaactggacgccatggacagggaggcggctcgagccatcagccgcggcggcaagcccccctcgaccatggccaagctggtgactggcatgggctttacgatccacggagcgctcaccccaggatcggaggggtgtgtctttgacagcagccacccagattacccccaacgggtaatcgtgaaggcggggtggtacacgagcacgagccacgaggcgcgactgctgaggcgactggaccaccccgcgatcctgcccctcctggacctgcatgtcgtctccggggtcacgtgtctggtcctccccaagtaccaggccgacctgtatacctatctgagtaggcgcctgaacccgctgggacgcccgcagatcgcagcggtctcccggcagctcctaagcgccgttgactacattcaccgccagggcattatccaccgcgacattaagaccgaaaatatttttattaacacccccgaggacatttgcctgggggactttggtgccgcgtgcttcgtgcagggttcccgatcaagccccttcccctacggaatcgccggaaccatcgacaccaacgcccccgaggtcctggccggggatccgtataccaccaccgtcgacatttggagcgccggtctggtgatcttcgagactgccgtccacaacgcgtccttgttctcggccccccgcggccccaaaaggggcccgtgcgacagtcagatcacccgcatcatccgacaggcccaggtccacgttgacgagttttccccgcatccagaatcgcgcctcacctcgcgctaccgctcccgcgcggccgggaacaatcgcccgccgtacacccgaccggcctggacccgctactacaagatggacatagacgtcgaatatctggtttgcaaagccctcaccttcgacggcgcgcttcgccccagcgccgcagagctgctttgtttgccgctgtttcaacagaaatgaccgcccccagggggcggtgctgtttgcgggttggcacaaaaagaccccgacccgcgtctgtggtgtttttggcatcatgtcgccgggcgccatgcgtgccgttgttcccattatcccattccttttggttcttgtcggtgtatcgggggttcccaccaacgtctcctccaccacccaaccccaactccagaccaccggtcgtccctcgcatgaagcccccaacatgacccagaccggcaccaccgactctcccaccgccatcagccttaccacgcccgaccacacaccccccatgccaagtatcggactggaggaggaggaagaggaggagggggccggggacggcgaacatcttgaggggggagatgggacccgtgacaccctaccccagtccccgggcccagccttcccgttggctgaggacgtcgagaaggacaaacccaaccgtcccgtagtcccatcccccgatcccaacaactcccccgcgcgccccgagaccagtcgcccgaagacaccccccaccattatcgggccgctggcaactcgccccacgacccgactcacctcaaagggacgacccttggttccgacgcctcaacataccccgctgttctcgttcctcactgcctcccccgccctggacaccctcttcgtcgtcagcaccgtcatccacaccttatcgtttttgtgtattggtgcgatggcgacacacctgtgtggcggttggtccagacgcgggcgacgcacacaccctagcgtgcgttacgtgtgcctgccgtccgaacgcgggtagggtatggggcgggggatggggagagcccacacgcggaaagcaagaacaataaaggcggtggtatctagttgatatgcatctctgggtgtttttggggtgtggcggacgcggggcggtcattggacggggtgcagttaaatacatgcccgggacccatgaagcatgcgcgacttccgggcctcggaacccacccgaaacggccaacggacgtctgagccaggcctggctatccggagaaacagcacacgacttggcgttctgtgtgtcgcgatgtctctgcgcgcagtctggcatctggggcttttgggaagcctcgtgggggctgttcttgccgccacccatcggggacctgcggccaacacaacggaccccttaacgcacgccccagtgtcccctcaccccagccccctggggggctttgccgtccccctcgtagtcggtgggctgtgcgccgtagtcctgggggcggcgtgtctgcttgagctcctgcgtcgtacgtgccgcgggtgggggcgttaccatccctacatggacccagttgtcgtataatttcccccccccccccccttctccgcatgggtgatgtcgggtccaaactcccgacaccaccagctggtatggtataaatcaccggtgcgccccccaaaccatgtccggcagggggatgggggggcgaatgcggagggcacccaacaacaccgggctaaccaggaaatccgtggccccggcccccaataaagatcgcggtagcccggccgtgtgacactatcgtccataccgaccacaccgacgaatcccctaagggggaggggccattttacgaggaggaggggtataacaaagtctgtctttaaaaagcaggggttagggagttgttcggtcataagcttcagcgcgaacgaccaactaccccgatcatcagttatccttaaggtctcttttgtgtggtgcgttccggtatggggggggctgccgccaggttgggggccgtgattttgtttgtcgtcatagtgggcctccatggggtccgcggcaaatatgccttggcggatgcctctctcaagatggccgaccccaatcgctttcgcggcaaagaccttccggtcctggaccagctgaccgaccctccgggggtccggcgcgtgtaccacatccaggcgggcctaccggacccgttccagccccccagcctcccgatcacggtttactacgccgtgttggagcgcgcctgccgcagcgtgctcctaaacgcaccgtcggaggccccccagattgtccgcggggcctccgaagacgtccggaaacaaccctacaacctgaccatcgcttggtttcggatgggaggcaactgtgctatccccatcacggtcatggagtacaccgaatgctcctacaacaagtctctgggggcctgtcccatccgaacgcagccccgctggaactactatgacagcttcagcgccgtcagcgaggataacctggggttcctgatgcacgcccccgcgtttgagaccgccggcacgtacctgcggctcgtgaagataaacgactggacggagattacacagtttatcctggagcaccgagccaagggctcctgtaagtacgccctcccgctgcgcatccccccgtcagcctgcctgtccccccaggcctaccagcagggggtgacggtggacagcatcgggatgctgccccgcttcatccccgagaaccagcgcaccgtcgccgtatacagcttgaagatcgccgggtggcacgggcccaaggccccatacacgagcaccctgctgcccccggagctgtccgagacccccaacgccacgcagccagaactcgccccggaagaccccgaggattcggccctcttggaggaccccgtggggacggtggcgccgcaaatcccaccaaactggcacataccgtcgatccaggacgccgcgacgccttaccatcccccggccaccccgaacaacatgggcctgatcgccggcgcggtgggcggcagtctcctggcagccctggtcatttgcggaattgtgtactggatgcgccgccgcactcaaaaagccccaaagcgcatacgcctcccccacatccgggaagacgaccagccgtcctcgcaccagcccttgttttactagatacccccccttaatgggtgcgggggggtcaggtctgcggggttgggatgggaccttaactccatataaagcgagtctggaaggggggaaaggcggacagtcgataagtcggtagcgggggacgcgcacctgttccgcctgtcgcacccacagctttttttgcgaaccgtcccgttccgggatgccgtgccgcccgttgcagggcctggtgctcgtgggcctctgggtctgtgccaccagcctggttgtccgtggccccacggtcagtctggtatcaaactcatttgtggacgccggggccttggggcccgacggcgtagtggaggaagacctgcttattctcggggagcttcgctttgtgggggaccaggtcccccacaccacctactacgatggggtcgtagagctgtggcactaccccatgggacacaaatgcccacgggtcgtgcatgtcgtcacggtgaccgcgtgcccacgtcgccccgccgtggctttcgccctgtgtcgcgcaaccgacagcactcacagccccgcatatcccaccctggagctgaatctggcccaacagccgcttttgcgggtccggagggcgacgcgtgactatgccggggtgtacgtgttacgcgtatgggtcggggacgcaccaaacgccagcctgtttgtcctggggatggccatagccgccgaagggactctggcgtacaacggctcggcccatggctcctgcgacccgaaactgcttccgtattcggccccgcgtctggccccggcgagcgtataccaacccgcccctaacccggcctccaccccctcgaccaccacctccaccccctcgaccaccacctccaccccctcgaccaccatccccgctccccaagcatcgaccacacccttccccacgggagacccaaaaccccaacctcacggggtcaaccacgaacccccatcgaatgccacgcgagcgacccgcgactcgcgatacgcgctaacggtgacccagataatccagatagccatccccgcgtccattatagccctggtgtttctggggagctgtatttgctttatacacagatgtcaacgccgctaccgacgctcccgccgcccgatttacaacccccagatacccactggcatctcatgcgcggtgaacgaagcggccatggcccgcctcggagccgagctcaaatcgcatccgagcaccccccccaaatcccggcgccggtcgtcacgcacaccaatgccctccctgacggccatcgccgaagagtcggagcccgcgggggcggctgggcttccgacgccccccgtggaccccacgacatccaccccaacgcctcccctgttggtataggtccacggccactggccgggggcaccacataaccgaccgcagtcactgagttgggaataaaccggtattatttacctatatacgtgtatgtccatttcttcccccccccccccggaaaccaaagaaggaaacaaagaatggatgggaggagttcaggaagccggggagagggcccgcggcgcatttaaggcgttgttgtgttgactttggctcttctggcgggttggtgcggtgctgtttgttgggctcccattttacccgaagatcggctgctatccccgggacatggatcgcggggcggtggtggggtttcttctcggtgtttgtgttgtatcgtgcttggcgggaacgcccaaaacgtcctggagacgggtgagtgtcggcgaggacgtttcgttgcttccagctccggggcctacggggcgcggcccgacccagaaactactatgggccgtggaacccctggatgggtgcggccccttacacccgtcgtgggtctcgctgatgccccccaagcaggtgcccgagacggtcgtggatgcggcgtgcatgcgcgctccggtcccgctggcgatggcgtacgcccccccggccccatctgcgaccgggggtctacggacggacttcgtgtggcaggagcgcgcggccgtggttaaccggagtctggttatttacggggtccgagagacggacagcggcctgtataccctgtctgtgggcgacataaaggacccggctcgccaagtggcctcggtggtcctggtggtgcaaccggccccagttccgaccccacccccgaccccagccgattacgacgaggatgacaatgacgagggcgagggcgaggacgaaagtctagccggcactcccgccagcgggaccccccggctcccgcctccccccgcccccccgaggtcttggcccagcgcccccgaagtctcacacgtgcgtggggtgaccgtgcgtatggagactccggaagctatcctgttttcccccggggaggcgtttagcacgaacgtctccatccatgccatcgcccacgacgaccagacctacaccatggacgtcgtctggttgaggttcgacgtgccgacctcgtgtgccgagatgcgaatatacgaatcgtgtctgtatcacccgcagctcccagagtgtctgtccccggccgacgctccgtgcgccgcgagtacgtggacgtctcgcctggccgtccgcagctacgcggggtgttccagaacaaaccccccgccgcgctgttcggccgaggctcacatggagcccttcccggggctggcgtggcaggcggcctccgtcaatctggagttccgggacgcgtccccacaacactccggcctgtatctgtgcgtggtgtacgtcaacgaccatattcacgcatggggccacattaccatcagcaccgcggcgcagtaccggaacgcggtggtggaacagcccctcccacagcgcggcgcggatttggccgagcccacccacccgcacgtcggggcccctccccacgcgcccccaacccacggcgccctgcggttaggggcggtgatgggggccgccctgctgctgtctgcgctggggttgtcggtgtgggcgtgtatgacctgttggcgcaggcgtgcctggcgggcggttaaaagcagggcctcgggtaaggggcccacgtacattcgcgtggccgacagcgagctgtacgcggactggagctcggacagcgagggagaacgcgaccaggtcccgtggctggcccccccggagagacccgactctccctccaccaatggatccggctttgagatcttatcaccaacggctccgtctgtatacccccgtagcgatgggcatcaatctcgccgccagctcacaacctttggatccggaaggcccgatcgccgttactcccaggcctccgattcgtccgtcttctggtaaggcgccccatcccgaggccccacgtcggtcgccgaactgggcgaccgccggcgaggtggacgtcggagacgagctaatcgcgatttccgacgaacgcggacccccccgacatgaccgcccgcccctcgccacgtcgaccgcgccctcgccacacccgcgacccccgggctacacggccgttgtctccccgatggccctccaggctgtcgacgccccctccctgtttgtcgcctggctggccgctcggtggctccggggggcttccggcctgggggccgtcctgtgtgggattgcgtggtatgtgacgtcaattgcccgaggcgcataaagggccggtggtccgcctagccgcagcaaattaaaaatcgtgagtcactgcgaccgcaacttcccacccggagctttcttccggcctcgatgacgtcccggctctccgatcccaactcctcagcgcgatccgacatgtccgtgccgctttatcccacggcctcgccagtttcggtcgaagcctactactcggaaagcgaagacgaggcggccaacgacttcctcgtacgcatgggccgccaacagtcggtattaaggcgtcgacgcagacgcacccgctgcgtcggcatggtgatcgcctgtctcctcgtggccgttctgtcgggcggatttggggcgctcctgatgtggctgctccgctaaaagaccgcatcgacacgcgcgtccttcttgtcgtctctcttcccccccatcaccccgcaatttgcacccagcctttaactacattaaattgggttcgattggcaatgttgtctcccggttgatttttgggtgggtggggagtgggtgggtggggagtgggtgggtggggagtgggtgggtggggagtgggtgggtggggagtgggtgggtggggagtgggtgggtggggagtgggtgggtggggagtgggtgggtggggagtgggtgggtggggagtggcaaggaagaaacaagcccgaccaccagacagaaaatgtaaccatacccaaaccgactctgggggctgtttgtggggtcggaaccataggatgaacaaaccaccccgtacctcccgcacccttgggtgcgggtggctcatcggcatctgtccggtatgggttgttccccacccacttgcgttcggacgtcttagaatcatggcggttttctatgccgacatcggttttctcccccgcaataagacacgatgcgataaaatctgtttgtgaaatttattaagggtacaaattgccctagcacaggggtggggttagggccgggtccccacacccaaacgcaccaaacagatgcaggcagtgggtcgagtacagccccgcgtacgaacacgtcgatgcgtgtgtcagacagcaccagaaagcacaggccatcaacaggtcgtgcatatgtcggtgggtttggacgcggggggccatggtggtgataaagttaatggccgccgtccgccagggccacaggggcgacgtctcttggttggcccggagccactgggtgtggaccagccgcgcgtggcggcccaacatggcccctgtagccgggggcgggggatcgcgcacgtttgcagcgcacatgcgagacacctcgaccacggttcggaagaaggcccggtggtccgcgggcaacatcaccaggtgcgcaagcgcccgggcgtccagagggtagagccctgagtcatccgaggttggctcatcgcccgggtcatgccgcaagtgcgtgtgggttgggcttccggtgggcgggacgcgaaccgcggtgtggagccctacgcgggcccgagcgtacgctccatcttgtggggagaaggggtctgggctcgccaggggggcatacttgcccgggctatacagacccgcgagccgtacgtggttcgcggggggtgcgtggggtccggggctcccggggaggccggggctcccggggttgtcgtggatccctggggtcacgcggtaccctggggtctctgggagctcgcggtactctgggttccctaggttctcggggtggtcgcggaacccggggctcccggggaacacgcggtgtcctggggattgttggcggtcggacggcttcagatggcttcgagatcgtagtgtccgcaccgactcgtagtagacccgaatctccacattgccccgccgcttgatcattatcaccccgttgcgggggtccggagatcatgcgcgggtgtcctcgaggtgcgtgaacacctctggggtgcatgccggcggacggcacgccttttaagtaaacatctgggtcgcccggcccaactggggccgggggttgggtctggctcatctcgagagccacggggggaaccaccctccgcccagaaacttgggcgatggtcgtacccgggactcaacgggttaccggattacggggactgtcggtcacggtcccgccggttcttcgatgtgccacacccaaggatgcgttgggggcgattttgggcagcagcccgggagagcgcagcagaggacgctccgggtcgtgcacggcggttttggccgcctcccggtcctcacgcccccttttattgatctcatcgcgtacgtcggcgtacgtcctgggcccaacccgcatgttgtccaggaaggtgtccgccatttccagggcccacgacatgctcccccgcccgacgagcaggaagcggtccacgcaacggtcgccgccggtcgccccgacgagcaggaagcggtccacgcaacggtcgccgccggtcgcctcgacgaggacgttcctcctgcgggaaggcacgaacgcgggtgagccccctcctccgcccccgcgtcccccctcctccgcccccgcgtcccccctcctccgcccccgcgtcccccctcctccgcccccgcgtcccccctcctccgcccccgcgtcccccctcctccgcccccgcgtcccccctcctccacccccgcgtccccccctcctccgcccacccaaggtgcttacccgtgcacaaaggcggaccggtgggtttctgtcgtcggaggcccccggggtgcgtcccctgtgtttcgtgggtggggtgggtgggtctttccgcgtgtccctttccgatgcgatcccgatcccgagccggggcgtcgcgatgccgacgccgtccgctccgacggccctctgcgagtcccgctcccggtccgcgtgctccgcagccgctcccgtcgttcgtggccggcgccgtctgcgggcgtcggtcgcgccgggcctttatgtgcgccggagagacccgccccccgccgcccgggcccgcccccggggccggcgcggagtcgggcacggcgccagtgctcgcacttcgccctaataatatatatatattgggacgaagtgcgaacgcttcgcgttctcacttcttttacccggcggccccgcccccttggggcggtcccgcccgccggccaatgggggggcggcaaggcgggcggcccttgggccgcccgccgtcccgttggtcccaacgtccggcgggcgggaccgggggcccggggacggccaacgggcgcgcggggctcgtatctcattaccgccgaaccgggaagtcggggcccgggccccgcccccggcccgttcctcgttagcatgcggaacggaagcggaaaccaccggatcgggcggtaatgagatgccatgcggggcggggcgcgggcccacccgccctcgcgccccgcccatggcagatggcgcggatgggcggggccgggggttcgaccaacgggccgcggccacgggcccccggcgtgccggcgtcggggcggggtcgtgcataatggaattccgttcggggcgggcccgcctggggggcggggggccggcggcctccgctgctcctccttcccgccggcccctgggactatatgagcccgaggacgccccgatcgtccacacggagcgcggctgccgacacggatccacgacccgacgcgggaccgccagagacagaccgtcagacgctcgccgcgccgggacgccgatacgcggacgaagcgcgggagggggatcggccgtccctgtcctttttcccacccaagcatcgaccggtccgcgctagttccgcgtcgacggcgggggtcgtcggggtccgtgggtctcgccccctccccatcgagagtccgtaggtgacctaccgtgctacgtccgccgtcgcagccgtatccccggaggatcgccccgcatcggcgatggcgtcggagaacaagcagcgccccggctccccgggccccaccgacgggccgccgcccaccccgagcccagaccgcgacgagcggggggccctcgggtggggcgcggagacggaggagggcggggacgaccccgaccacgaccccgaccacccccacgacctcgacgacgcccggcgggacgggagggcccccgcggcgggcaccgacgccggcgaggacgccggggacgccgtctcgccgcgacagctggccctgctggcctccatggtagaggaggccgtccggacgatcccgacgcccgaccccgcggcctcgccgccccggacccccgcctttcgagccgacgacgatgacggggacgagtacgacgacgcagccgacgccgccggcgaccgggccccggcccggggccgcgcacgggaggccccgctacgcggcgcgtatccggaccccacggaccgcctgtcgccgcgcccgccggcccagccgccgcggagacgtcgtcacggccggcggcggccatcggcgtcatcgacctcgtcggactccgggtcctcgtcctcgtcgtccgcatcctcttcgtcctcgtcgtccgacgaggacgaggacgacgacggcaacgacgcggccgaccgcgcacgcgaggcgcgggccgtcgggcggggtccgtcgagcgcggcgccggaagcccccgggcggacgccgcccccgcccgggccaccccccctctccgaggccgcgcccaagccccgggcggcggcgaggacccccgcggcctccgcgggccgcatcgagcgccgccgggcccgcgcggcggtggccggccgcgacgccacgggccgcttcacggccgggcagccccggcgggtcgagctggacgccgacgcggcctccggcgccttctacgcgcgctatcgcgacgggtacgtcagcggggagccgtggcccggcgccgggcccccgcccccggggcgggtgctgtacggcggcctgggcgacagccgcccgggcctctggggggcgcccgaggcggaggaggcgcgacgccggttcgaggcctcgggcgccccggcggccgtgtgggcgcccgagctgggcgacgccgcgcagcagtacgccctgatcacgcggctgctgtacaccccggacgcggaggccatggggtggctccagaacccgcgcgtggtccccggggacgtggcgctggaccaggcctgcttccggatctcgggcgccgcgcgcaacagcagctccttcatcaccggcagcgtggcgcgggccgtgccccacctgggctacgccatggcggccggccgcttcggctggggcctggcgcacgcggcggccgccgtggccatgagccgccgatacgaccgcgcgcagaagggcttcctgctgaccagcctgcgccgcgcctacgcgcccctgttggcgcgcgagaacgcggcgctgacgggggccgcggggagccccggcgccggcgcagatgacgagggggtcgccgccgccgtcgtcgccgccgccgccgcaccgggcgagcgcgcggtgcccgccgggtacggcgccgcggggatcctcgccgccctggggcggctgtccgccgcgcccgcctcccccgcggggggcgacgaccccgacgccgcccgccacgccgacgccgacgacgacgccgggcgccgcgcccaggccggccgcgtggccgtggagtgcctggccgcctgccgcgggatcctggaggcgctggccgagggcttcgacggcgacctggcggccgtcccggggctggccggggcccggcccgccagccccccgcggccggagggacccgcgggccccgcttccccgccgccgccgcacgccgacgcgccccgcctgcgcgcgtggctgcgcgagctgcggttcgtgcgcgacgcgctggtgctcatgcgcctgcgcggggacctgcgcgtggccggcggcagcgaggccgccgtggccgccgtgcgcgccgtgagcctggtcgccggggccctgggccccgcgctgccgcgggacccgcgcctgccgagctccgcggccgccgccgccgcggacctgctgtttgagaaccagagcctgcgccccctgctggcggcggccgccagcgcaccggacgccgccgacgcgctggcggccgccgccgcctccgccgcgccgcgggaggggcgcaagcgcaagagtcccggcccggcccggccgcccggaggcggcggcccgcgacccccgaagacgaagaagagcggcgcggacgcccccggctcggacgcccgcgcccccctccccgcgcccccctccacgcccccggggcccgagcccgcccccgcccagcccgcggcgccccgggccgccgcggcgcaggcccgcccgcgccccgtggcgctgtcgcgccggcccgccgagggccccgaccccctgggcggctggcggcggcagcccccggggcccagccacacggcggcgcccgcggccgccgccctggaggcctactgctccccgcgcgccgtggccgagctcacggaccacccgctgttccccgtcccctggcgaccggccctcatgtttgacccgcgggccctggcctcgatcgccgcgcggtgcgccgggcccgccgccgccgcccaggccgcgtgcggcggcggcgacgacgacgataacccccacccccacggggccgccgggggccgcctctttggccccctgcgcgcctcgggcccgctgcgccgcatggcggcctggatgcgccagatccccgaccccgaggacgtgcgcgtggtggtgctgtactcgccgctgccgggcgaggacctggccggcggcggggcctcgggggggccgccggagtggtccgccgagcgcggcgggctgtcctgcctgctggcggccctggccaaccggctgtgcgggccggacacggccgcctgggcgggcaactggaccggcgcccccgacgtgtcggcgctgggcgcgcagggcgtgctgctgctgtccacgcgggacctggccttcgccggggccgtggagtttctggggctgctcgccagcgccggcgaccggcggctcatcgtggtcaacaccgtgcgcgcctgcgactggcccgccgacgggcccgcggtgtcgcggcagcacgcctacctggcgtgcgacctgctgcccgccgtgcagtgcgccgtgcgctggccggcggcgcgggacctgcgccgcacggtgctggccccgggccgcgtgttcggcccgggggtcttcgcgcgcgtggaggccgcgcacgcgcgcctgtaccccgacgcgccgccgctgcgcctgtgccgcggcggcaacgtgcgctaccgcgtgcgcacgcgcttcggcccggacacgccggtgcccatgtccccgcgcgagtaccgccgggccgtgctgccggcgctggacggccgggcggcggcctcggggaccaccgacgccatggcgcccggcgcgccggacttctgcgaggaggaggcccactcgcaccgcgcctgcgcgcgctggggcctgggcgcgccgctgcggcccgtgtacgtggcgctggggcgcgaggcggtgcgcgccggcccggcccggtggcgcgggccgcggagggacttttgcgcccgcgccctgctggagcccgacgacgacgcccccccgctggtgctgcgcggcggcgacgacgacgacgacggcccgggggccctgccgccggcgttgcccgggattcgctgggcctcggccacgggccgcagcggcaccgtgctggcggcggcgggggccgtggaggtgctgggggcggaggcgggcttggccacgcccccgcgacgggaagttgtggactgggaaggcgcctgggacgacgacgacggcggcgcgttcgagggggacggggtgctgtaacgggccgggacggggcggggcgcttgcgaaacccgaagacgcaataaacgacaacgacctgatttagttttgcagtagcgttgtttatttcgaggggcgggagggggcgaggggcgggagggggcgaggggcgggagggggcgaggggcgggagggggcgaggggcgggagggggcgaggggcgggagggggcgaggggcgggagggggcgaggggcgggagggggcgaggggcgggagggggcgaggggcgggagggggcgaggggcgggagggggcgaggggcgggagggggcgaggggcgggagggggcgaggggcgggagggggcgaggggcgggagggggcgaggggcgggagggggcgaggggcgggagggggcgaggggcgggagggggcgaggggcgggagggggcgaggggcggtggtggtgcgcgggcgcccccggagggtttggatctctgacctgagattggcggcactgaggtagagatgcccgaacccccccgagggagcgcgggacgcggccggggagggctggggccggggagggctggggccggggagggctggggccggggagggctggggccggggagggctggggccggggagggctggggccggggagggctggggctggggagggctggggctggggagggctggggcggtggtgtgtgacaggagcggcgtgttgcgctgggggacgtctggaggagcggggggtgcgcggtgacgtgtggatgaggaacaggagttgttgcgcggtgagttgtcgctgtgagttgtgttggtgggcaggtgtggtggatgacgtgacgtgtgacgtgtggatgaggaaccggagtcgccggtgcgccgtgctgttggtgttctgttggtgttgttacacctgtggcagcccgggccccccgcgggcggggcggcgcgcaaaaaaggcgggcggcggtccgggcggcgtgcgcgcgcgcggcgggcgttgggggagcggggggaggagcggggggaggagcggggggaggagcggggggaggagcggggggaggagcggggggaggagcggggggaggagcggggggaggagcggggggaggagcggggggaggagcggggggaggagcggggggaggagcggggggaggagcggggggaggagcggggggaggagcggggggaggagcggggggaggagcggggggaggagcggaaaacgggccccccccgaaacacaccccccgggggtcgcgcgcggccctttaaagcg

SEQ ID NO: 8 - DNA, 159958 bp, Artificial Sequence
  C173 from HSV-C134 Complete Viral Genome v1 Chimeric HSV expressing EphA2-Ecto-MLM
agcccgggccccccgcgggcggggcggcgcgcaaaaaaggcgggcggcggtccgggcggcgtgcgcgcgcgcggcgggcgttggggagcggggggaggagcggggggaggagcggggggaggagcggggggaggagcggggggaggagcggggggaggagcggggggaggagcggggggaggagcggggggaggagcggggggaggagcggggggaggagcggggggaggagcggggggaggagcggggggaggagcggggggaggagcggggggaggagcggggggaggagcggggggaggagcggaaaacgggccccccccgaaacacaccccccgggggtcgcgcgcggccctttaaagcgcggcggcgcagcccgggccccccgcggccgagacgagcgagttagacaggcaagcactactcgcctctgcacgcacatgcttgcctgtcaaactctaccaccccggcacgctctctgtctccatggcccgccgccgccgccatcgcggcccccgccgcccccggccgcccgggcccacgggcgccgtcccaaccgcacagtcccaggtaaccgcctatgggaatgaaagaccccacctgtaggtttggcaagctaggatcaaggtcaggaacagagaaacaggagaatatgggccaaacaggatatctgtggtaagcagttcctgccccgctcagggccaagaacagttggaacaggagaatatgggccaaacaggatatctgtggtaagcagttcctgccccgctcagggccaagaacagatggtccccagatgcggtcccgccctcagcagtttctagagaaccatcagatgtttccagggtgccccaaggacctgaaatgaccctgtgccttatttgaactaaccaatcagttcgcttctcgcttctgttcgcgcgcttctgctccccgagctctatataagcagagctggtttagtgaaccgtcagatcgcctggagacgccatccacgctgttttgacctccatagaagacaccgactctagctagggatctcctaggaagctggccgcacaaagtggtaccggatcccgggtcgaccatggagctccgggcagtcggtttctgcctggcgctgctgtggggttgcgcgctggcggccgcggcggcacagggaaaggaagttgttttgttggacttcgcagcaatgaagggagagctcggctggctcacgcacccctatggcaaagggtgggacctgatgcagaacatcatggacgacatgcctatctacatgtactcggtgtgcaacgtggtatccggcgaccaggacaactggctccgcaccaactgggtgtaccgggaggaggccgagcgcatctttattgagctcaagttcacggtgcgagactgtaacagcttcccgggtggcgccagctcatgcaaagagaccttcaacctctactatgcagagtcagatgtggactatggcaccaacttccagaagcgccagttcaccaagattgacaccatcgcccctgacgagatcacggtcagcagtgacttcgaggctcgcaatgtcaagctgaacgtagaggagcgcatggtggggccccttacccggaagggcttctacctggccttccaggacatcggcgcctgcgtggcgctgctctccgttcgcgtctactacaagaagtgtcccgagatgctgcagagcttggctcgcttccccgagaccattgctgtcgctgtctccgatacacaacccctggccacggtggccggtacctgcgtggaccatgccgtggtgccttatgggggcgaggggcctctcatgcactgcacggtggatggcgagtggctggtgcccatcgggcagtgcctgtgccaggaaggctacgagaaggtcgaggatgcctgccgagcctgttctccaggattcttcaagtctgaggcatctgagagcccttgcctggagtgtccagagcataccctgccatccacagagggtgccacctcctgccagtgtgaagaaggctatttcagggcacctgaggacccactgtccatgtcttgcacacgtccaccctctgcccccaactacctcacggccattggcatgggtgccaaagtagaactgcgttggacagctcccaaggacactggtggccgccaggacattgtctacagtgtcacttgcgaacagtgctggccagagtctggcgagtgtgggccctgtgaggcgagcgtgcgctattcagaacctcctcacgccctgacccgcacgagtgtgacagtcagtgacctggagccccacatgaactataccttcgctgtcgaagcacgcaatggtgtctcaggcctggtgactagccgaagcttccggactgccagcgtcagtattaaccaaacagagccccccaaagtgaggctggaggaccgaagcaccacctccctgagtgtcacctggagcatcccggtgtcacagcagagccgtgtgtggaagtacgaagtcacctaccgcaagaagggggatgccaacagctataatgtgcgccgcacggaaggcttctccgtgaccctggatgaccttgctccggataccacgtacctggtgcaggtgcaggcgctgacgcaggagggccagggagccggcagcaaagtgcacgagttccagacactgtccacggaaggatctgggaattcagaacaaaaactcatctcagaagaagatctaggaggcggcgggtcaggtggaggtggctctggcggtggcggttcttgttggacgctggatcgggggtattgctcctaattccgactcactatagggcgaattaattccggagatctctagatccggagagacgatggcaggagccgcgcatatatacgcttggagccagcccgccctcacagggcgggccgcctcgggggcgggactggccaatcggcggccgccagcgcggcggggcccggccaaccagcgtccgccgagtcttcggggcccggcccattgggcgggagttaccgcccaatgggccgggccgcccacttcccggtatggtaattaaaaacttgcaagaggccttgttccgcttcccggtatggtaattagaaactcattaatgggcggccccggccgcccttcccgcttccggcaattcccgcggcccttaatgggcaaccccggtattccccgcctcccgcgccgcgcgtaaccactcccctggggttccgggttatgctaattgcttttttggcggaacacacggcccctcgcgcattggcccgcgggtcgctcaatgaacccgcattggtcccctggggttccgggtatggtaatgagtttcttcgggaaggcgggaagccccggggcaccgacgcaggccaagcccctgttgcgtcggtgggaggggcatgctaatggggttctttgggggacaccgggttggtcccccaaatcgggggccgggccgtgcatgctaatgatattctttgggggcgccgggttggtccccggggacggggccgccccgcggtgggcctgcctcccctgggacgcgcggccattgggggaatcgtcactgccgcccctttggggaggggaaaggcgtggggtataagttagccctggcccgacagtctggtcgcatttgcacctcggcactcggagcgagacgcagcagccaggcagactcgggccgccccctctccgcatcaccacagaagccccgcctacgttgcgacccccagggaccctccgtccgcgaccctccaaccgcatacgacccccatggagccccgccccggagcgagtacccgccggcctgagggccgcccccagcgcgaggtgaggggccgggcgccatgtctggggcgccatattggggggcgccatattggggggcgccatgttgggggacccccgacccttacactggaaccggccgccatgttgggggacccccactcatacacgggagccgggcgccatgttagggggcgtggaaccccgtgacactatatatacagggaccgggggcgccatgttagggggcgcggaaccccctgaccctatatatacagggaccggggtcgccctgttgggggtcgccatgtgaccccctgactttatatatacagaccccccaacacatacacatggcccctttgactcagacgcagggcccggggtcgccgtgggaccccctgactcatacacagagacacgcccccacaacaaacacacagggaccggggtcgccgtgttagggggcgtggtccccactgactcatacgcagggcccccttactcacacgcatctaggggggtggggaggagccgcccgccatatttgggggacgccgtgggacccccgactccggtgcgtctggagggcgggagaagagggaagaagaggggtcgggatccaaaggacggacccagaccacctttggttgcagacccctttctcccccctcttccgaggccagcaggggggcaggactttgtgaggcggggggggggagagggggaactcgtgggcgctgattgacgcgggaaatccccccattcttacccgcccccctttttttccccttagcccgccccggatgtctgggtgtttccctgcgaccgagacctgccggacagcagcgactctgaggcggagaccgaagtgggggggcggggggacgccgaccaccatgacgacgactccgcctccgaggcggacagcacggacacggaactgttcgagacggggctgctggggccgcagggcgtggatgggggggcggtctcgggggggagccccccccgcgaggaagaccccggcagttgcgggggcgccccccctcgagaggacggggggagcgacgagggcgacgtgtgcgccgtgtgcacggatgagatcgcgccccacctgcgctgcgacaccttcccgtgcatgcaccgcttctgcatcccgtgcatgaaaacctggatgcaattgcgcaacacctgcccgctgtgcaacgccaagctggtgtacctgatagtgggcgtgacgcccagcgggtcgttcagcaccatcccgatcgtgaacgacccccagacccgcatggaggccgaggaggccgtcagggcgggcacggccgtggactttatctggacgggcaatcagcggttcgccccgcggtacctgaccctgggggggcacacggtgagggccctgtcgcccacccaccctgagcccaccacggacgaggatgacgacgacctggacgacggtgaggcgggggggcggcgaggaccctgggggaggaggaggaggaggggggagggaggaataggcgggcgggggggcgaggaaagggcgggcgcggaaagggagggcctgggagggggcgtaacctgatcgcgccccccgttgtctcttgcagcagactacgtaccgcccgccccccgccggacgccccgcgcccccccacgcagaggcgccgccgcgccccccgtgacgggcggggcgtctcacgcagccccccagccggccgcggctcggacagcgcccccctcggcgcccatcgggccacacggcagcagtaacaccaacaccaccaccaacagcagcggcggcggcggcggctcccgccagtcgcgagccgcggcgccgcggggggcgtctggcccctccgggggggttggggttggggttggggttgttgaagcggaggcggggcggccgaggggccggacgggcccccttgtcaacagacccgccccccttgcaaacaacagagaccccatagtgatcagcgactcccccccggcctctccccacaggccccccgcggcgcccatgccaggctccgccccccgccccgggcccaccgcgtcctcggccgcgtcgggacccgcgcgcccccgcgcggccgtggccccgtgcgtgcgagcgccgcctccggggcccggcccccgcgccccggcccccgcggacgcgcgccgtgtgccccagtcgcactcgtccctggctcaggccgcgaaccaagaacagagtctgtgccgggcgcgtgcgacggtggcgcgcggctcgggggggccgggcgtggagggtggacacgggccctcccgcggcgccgccccctccggcgcccccccgctcccctccgccgcctctgtcgagcaggaggcggcggtgcgtccgaggaagaggcgcgggtcgggccaggaaaacccctccccccagtccacgcgtccccccctcgcgccggcaggggccaagagggcggcgacgcaccccccctccgactcagggccgggggggcgcggccagggtgggcccgggacccccctgacgtcctcggcggcctccgcctcttcctcctctgcctcttcctcctcggccccgactcccgcgggggccgcctcttccgccgccggggccgcgtcctcctccgcttccgcctcctcgggcggggccgtcggtgccctgggagggagacaagaggaaacctccctcggcccccgcgctgcttctgggccgcgggggccgaggaagtgtgcccggaagacgcgccacgcggagacttccggggccgcccccgcgggcggcctcacgcgctacctgcccatctcgggggtctctagcgtggtcgccctgtcgccttacgtgaacaagacgatcacgggggactgcctgcccatcctggacatggagacggggaacatcggggcgtacgtggtcctggtggaccagacgggaaacatggcgacccggctgcgggccgcggtccccggctggagccgccgcaccctgctccccgagaccgcgggtaaccacgtgatgccccccgagtacccgacggcccccgcgtcggagtggaacagcctctggatgacccccgtggggaacatgctgttcgaccagggcaccctagtgggcgccctggacttccgcagcctgcggtctcggcacccgtggtccggggagcagggggcgtcgacccgggacgagggaaaacaataagggacgccccccgtgtttgtggggaggggggggtcgggcgctgggtggtctctggccgcgcccactacaccagccaatccgtgtcggggaggggaaaagtgaaagacacgggcaccacacaccagcgggtctttagtgttggccctaataaaaaactcaggggatttttgctgtctattgggaaataaaggtttacttttgtatcttttccctgtctgtgttggatggatctcgggggtgcgtgggagtgggggtgcgtgggagtgggggtgcgtgggagtgggggtgcgtgggagtgggggtgcgtgggagtgggggtgcgtgggagtgggggtgcgtgggagtgggggtgcgtgggagtgggggtgcgtgggagtgggggtgccatgttgggcaggctctggtgttaaccacagagccgcggcccgggctgcctgaccaccgatccccgaaagcatcctgccactggcatggagccagaaccacagtgggttgggtgtgggtgttaagtttccgcgagcgcctgcccgcccggactgacctggcctctggccgccacaaagggcgggggggggttaactacactatagggcaacaaaggacgggaggggtggcggggcgggacggggcgcccaaaagggggtcggccacaccacagacgtgggtgttggggggtggggcggaggggtggggggggagacagaaacaggaacatagttagaaaacaagaatgcggtgcagccagagaatcacaggagacgaggggatgggcgtgttggttaccaacccacacccaggcatgctcggtggtatgaaggagggggggcggtgcttcttagagaccgccgggggacgtggggttggtgtgcagaggcacgcgcacccgcgtcggccaggtgggccggtaccccatcccccctcccccgacccttcccacccccgcgtgccagagatcaccccggtcccccggcacccgccactcctccatatcctcgctttaggaacaactttagggggggtacacacgcgccgtgcatttccttccacaccccccctcccccgcactcccccccccccggcagtaagacccaagcatagagagccaggcacaaaaacacaggcggggtgggacacatgccttcttggagtacgtgggtcattggcgtggggggttacagcgacaccggccgaccccctggcggtcttccagccggcccttagataagggggcagttggtggtcggacgggtaagtaacagagtctgactaagggtgggagggggggaaaagaacgggctggtgtgctgtaacacgagcccacccgcgagtggcgtggccgaccttagcctctggggcgccccctgtcgtttgggtcccccccctctattggggagaagcaggtgtctaacctacctggaaacgcggcgtctttgttgaaccacaccggggcgcccttgacgagtgggataacgggggaggaagggagggaggagggtactgggggtgaagaaggggggggggggagaagcgagaacaggaaaggcgacggagcccgacaaaacaccgagaaaaaaaaaccacagcgcatgcgccgggccgttgtggggccccgggccggggccccttgggtccgccggggccccgggccgggccgccacgggggccggccgttggcggtaaccccgattgtttatctcaggccccgggccgggaacccggaaaagcctccggggggcctttttcgcgtcgcgtgccggcgagcgggcccggacggggcccggaccgccgcggtcgggggccccctcgtcccgggccgtacgcggccttcgccccgtgaggggacagacgaacgaaacattccggcgacggaacgaaaaacaccccagacgggttaaagaaacagaaaccgcaaccccccccacccccgaaacggggaaaacaaaaaacagaccagcggccggccggcgcttagggggaggatgtcgccgacgccccttggccgccccggctgcaggggggcccggagagccgcggcacccggacgcgcccggaaagtctttcgcaccacccgcgatcggcacggccgcgcccccgcttttataaaggctcagatgacgcagcaaaaacaggccacagcaccacgtgggtaggtgatgtaattttattttcctcgtctgcggcctaatggatttccgggcgcggtgcccctgtctgcagagcacttaacggattgatatctcgcgggcacgcgcgcccttaatggaccggcgcggggcggggggccggatacccacacgggcgggggggggggtgtcgcgggccgtctgctggcccgcggccacataaacaatgactctgggcctttctgcctctgccgcttgtgtgtgcgcgcgccggctctgcggtgtcggcggcggctgcggcggctgcggcggccgccgtgttcggtctcggtagccggccggcgggtggactcgcggggggccggagggtggaaggcaggggggtgtaggatgggtatcaggacttccacttcccgtccttccatcccccgttcccctcggttgttcctcgcccccccccacaccccgccgctttccgttggggttgttattgttgtcgggatcgtgcgggccgggggtcgccggggcaggggcgggggcgggggtgctcgtcgatcgaccgggctcagtgggggcgtggggtgggggggaaaaggcgaagagactgggggtgggggggggtgtcgggggtggctgtttttttttgtgggtgttttttgtggctgttcccgtcccccgtcacccccctccctccgtccccccgtcgcgggtgtttgtgtttgtttattccgacatcggtttatttaaataaacacagccgttctgcgtgtctgttcttgcgtgtggctgggggcttatatgtggggtcccgggggcgggatggggtttagcggcggggggcggcgcgccggacggggcgctggagataacggcccccggggaacgggggaccggggctgggtctcccgaggtgggtgggtgggcggcggtggccgggccgggccgggccgggtgggcggggtttggaaaaacgaggaggaggaggaggagaaggagggggggggagacggggggaaagcaaggacacggcccggggggtgggagcgcgggccgggccgctcgtaagagccgcgacccggccgccggggagcgttgtcgccgtcggtctgccggcccccgtccctcccttttttgaccaaccagcgcccccccccctcaccaccattcctaccaccaccaccaccaccgacacctcccgcacacccccgcccacactccccccccccacccaacccgcaccacgagcacgggttgggggtagcaggggatcaaaggggggcaaggccggcggggcggttcgggggcgggggcgggagaccgagtaggccccgcccatccgcggcccctcccggcagccacgccccccagcgtcgggtgtcacggggaaagagcagggggagaggggagagggggggagaggggagagggggggagaggggagagggggggagaggggagagggggggagaggggagagggggggagaggggagagggggggagaggggagagggggggagaggggagagggggggagaggggagagggggggagaggggagagggggggagagggggtatataaaccaacgaaaagcgcgggaacggggatacggggcttgtgtggcacgacgtcgtggttgtgttactgggcaaacacttggggactgtaggtttctgtgggtgccgaccctaggcgctatggggattttgggttgggtcgggcttattgccgttggggttttgtgtgtgcgggggggcttgtcttcaaccgaatatgttattcggagtcgggtggctcgagaggtgggggatatattaaaggtgccttgtgtgccgctcccgtctgacgatcttgattggcgttacgagaccccctcggctataaactatgctttgatagacggtatatttttgcgttatcactgtcccggattggacacggtcttgtgggataggcatgcccagaaggcatattgggttaacccctttttatttgtggcgggttttttggaggacttgagtcaccccgcatttcctgccaacacccaggaaacagaaacgcgcttggccctttataaagagatacgccaggcgctggacagtcgcaagcaggccgccagccacacacctgtgaaggctgggtgtgtgaactttgactattcgcgcacccgccgctgtgtagggcgacaggatttgggacctaccaacggaacgtctggacggaccccggttctgccgccggacgatgaagcgggcctgcagccgaagcccctcaccacgccgccgcccatcatcgccacgttggaccccaccccgcgacgggacgccgccgcaaaaagcagacgccgacgaccccactcccggcgcatctaatgatgccgcgacggaaacccgtccgggttcggggggcgaaccggccgcctgtcgctcgtcagggccggcgggcgctcctcgccgccctagaggctgtcccgctggtgtgacgttttcctcgtccgcgccccccgaccctcccatggatttaacaaacgggggggtgtcgcctgtggcgacctcggcgcctctggactggaccacgtttcggcgtgtgtttctgatcgacgacgcgtggcggcccctgttggagcctgagctggcgaaccccttaaccgcccacctcctgaccgaatataatcgtcggtgccagaccgaagaggtgctgccgccgcgggaggatgtgttttcgtggactcgttattgcacccccgacgaggtgcgcgtggttatcatcggccaggacccatatcaccaccccggccaggcgcacggacttgcgtttagcgtgcgcgcgaacgtgccgcctcccccgagtcttcggaatgtcttggcggccgtcaagaactgttatcccgaggcacggatgagcggccacggttgcctggaaaagtgggcgcgggacggcgtcctgttactaaacacgaccctgaccgtcaagcgcggggcggcggcgtcccactctagaatcggttgggaccgcttcgtgggcggagttatccgccggttggccgcgcgccgccccggcctggtgtttatgctctggggcgcacatgcccagaatgccatcaggccggaccctcgggtccattgcgtcctcaagttttcgcacccgtcgcccctctccaaggttccgttcggaacatgccagcatttcctcgtggcgaatcgatatctcgagacccggtcgatttcacccatcgactggtcggtttgaaaggcatcgacgtccggggttttcgtctgtgggggcttttgggtatttccgatgaataaagacggttaatggttaaacctctggtctcatacgggtcggtgatgtcgggcgtcgggggagagggagttccctctgcgcttgcgattctagcctcgtggggctggacgttcgacacgccaaaccacgagtcagggatatcgccagatacgactcccgcagattccattcggggggccgctgtggcctcacctgaccaacctttacacgggggcccggaacgggaggccacagcgccgtctttctccccaacgcgcgcggatgacggcccgccctgtaccgacgggccctacgtgacgtttgataccctgtttatggtgtcgtcgatcgacgaattagggcgtcgccagctcacggacaccatccgcaaggacctgcggttgtcgctggccaagtttagcattgcgtgcaccaagacctcctcgttttcgggaaacgccccgcgccaccacagacgcggggcgttccagcgcggcacgcgggcgccgcgcagcaacaaaagccttcagatgtttgtgttgtgcaaacgcacccacgccgctcgagtgcgagagcagcttcgggtcgttattcagtcccgcaagccgcgcaagtattacacgcgatcttcggacgggcggctctgccccgccgtccccgtgttcgtccacgagttcgtctcgtccgagccaatgcgcctccaccgagataacgtcatgctggcctcgggggccgagtaaccgcccccccgcgccaccctcactgcccgtcgcgcgtgtttgatgttaataaataacgcataaattatcttaatagatctcccgatcccctatggtgcactctcagtacaatctgctctgatgccgcatagttaagccagtatctgctccctgcttgtgtgttggaggtcgctgagtagtgcgcgagcaaaatttaagctacaacaaggcaaggcttgaccgacaattgcatgaagaatctgcttagggttaggcgttttgcgctgcttcgcgatgtacgggccagatatacgcgttgacattgattattgactagttattaatagtaatcaattacggggtcattagttcatagcccatatatggagttccacgttacataacttacggtaaatggcccgcctggctgaccgcccaacgacccccgcccattgacgtcaataatgacgtatgttcccatagtaacgccaatagggactttccattgacgtcaatgggtggagtatttacggtaaactgcccacttggcagtacatcaagtgtatcatatgccaagtacgccccctattgacgtcaatgacggtaaatggcccgcctggcattatgcccagtacatgaccttatgggactttcctacttggcagtacatctacgtattagtcatcgctattaccatggtgatgcggttttggcagtacatcaatgggcgtggatagcggtttgactcacggggatttccaagtctccaccccattgacgtcaatgggagtttgttttggcaccaaaatcaacgggactttccaaaatgtcgtaacaactccgccccattgacgcaaatgggcggtaggcgtgtacggtgggaggtctatataagcagagctctctggctaactagagaacccactgcttactggcttatcgaaattaatacgactcactatagggagacccaagctggctagttaagcttggtaccgagctcggatccactagtccagtgtggtggaattgcccttggatcctcaatggcccagcgcaacggcatgtcgccgcgccccccgcccctcggtcgcggccgcggggccggagggccttcgggggttggttcctctcctccttcttcttgtgtgccgatgggagcgccgtccacagcgggcactggtgcgagtgctgcggctacgacgacgccgggccacggcgtccaccgggtagaaccccgcgggccgccgggcgcccctccgagtagcgacaacaatggcaacttttggcacggcccggagcgcctgttgctgtctcagattccggtggagcgccaggcgctgacggagctggaataccaggccatgggcgccgtgtggcgcgcggcgtttttggccaacagcacgggccgcgccatgcgcaagtggtcgcagcgcgacgcgggcacgctgctgccgctcggacggccgtacggattctacgcgcgggtgacgccgcgcagccagatgaacggcgtgggcgcgacggacctgcgtcaactgtcgccgcgggacgcgtggatcgtactggtggctaccgtggtgcacgaggtggaccccgcagccgacccgacgttgggcgacaaggccggccatcccgagggtctgtgcgcgcaggacggactgtacctggcgctgggcgccgggttccgcgtgttcgtgtacgacctggcaaacaacacgctgatcctagcggcgcgcgacgcggacgagtggtttcggcacggcgcgggcgaggtggtgcggctgtaccgctgcaaccggctgggcgtgggcaccccgcgcgcgacgctgctgcctcagccggcgctccgacagacgttgctgcgcgccgaggaggcgacggcgctcggacgggagctgcgccggcggtgggccggcacgacggtggcgctgcagacgccgggcaggcgactgcagccgatggtactgctgggcgcgtggcaggagctggcgcagtacgagccgttcgcgtcggcgccgcaccccgcgtcgctgctgacggccgtgcgtcggcacctgaaccagcgtctgtgctgcggctggctggcgctgggcgcggtgctgcccgcgcggtggctgggctgcgcggcggggccggcgacggggacggcggcggggacgacgtcgccgccagcggcgagcggcacggagacggaggccgccggcggggacgcgccgtgcgcgatagcgggagccgtggggtccgctgtacctgtgcctccgcagccgtacggcgccgccggcgggggcgcgatttgcgtgcctaacgcggacgcgcacgcggtggtcggggcggacgcggcagcagcagcggcgccgacggtgatggtgggttcgacagcgatggcgggtccggcggcgtcggggaccgtgccgcgcgccatgctggtggtgctgctggacgagctgggcgccgtgttcgggtactgcccgctggacgggcacgtgtacccgctggcggcggagctgtcgcactttctgcgcgcgggcgtgctgggcgcgctggcgctgggacgcgagtcggcgcccgccgccgaggccgcgcggcggctgctgcccgagctggaccgcgagcagtgggagcggccgcgctgggacgcgctgcacctgcacccgcgcgccgcgctgtgggcgcgcgagccgcacgggcagtgggagttcatgtttcgcgaacaacgcggtgaccccataaatgatcccctcgcatttcgtctttcggacgctcgaactctcggtctcgacctcaccaccgtcatgacagagcgtcaaagtcaattgcccgaaaagtatatcggtttctatcagattaggaaacctccttggctcatggaacaacctccacccccatctcgccaaaccaaaccggacgctgcaacgatgcccccaccgctcagtgctcaggcaagcgtcagctacgcgctccgatacgatgacgagtcctggcgcccgctcagcacagttgacgaccacaaagcctggttggatctcgacgaatcacattgggtcctcggggacagccgacccgacgatataaaacaacgcagactgctgaaggccactcaacgacgaggcgccgaaatcgacagacccatgcctgtcgtgcctgaagaatgttacgaccaacgcttcactaccgaaggccaccaggtcatcccgttgtgcgcgtccgaacccgaggatgacgacgaagatcctacctacgacgaattgccgtcgcgcccaccccagaaacataagccgccagacaaacctccgcgcttatgcaaaacgggccccggcccacctccgctgccgccaaagcaacggcacggttccaccgacggaaaagtttctgcgccccgacagtcggagcatcataaaagacagacccgaccgccaaggccgccaccgcccaaattcggggatagaaccgcggcccatctctcgcaaaatatgcgggacatgtacctcgatatgtgtacatcttcgggccacaggccacggccgccagcacctccgcggccgaaaaaatgtcaaacacacgcccctcaccacgttcatcataagcttaagggcaattctgcagatatccagcacagtggcggccgctcgagtctagagggcccgcggttcgaaggtaagcctatccctaaccctctcctcggtctcgattctacgcgtaccggtcatcatcaccatcaccattgagtttaaacccgctgatcagcctcgactgtgccttctagttgccagccatctgttgtttgcccctcccccgtgccttccttgaccctggaaggtgccactcccactgtcctttcctaataaaatgaggaaattgcatcgcattgtctgagtaggtgtcattctattctggggggtggggtggggcaggacagcaagggggaggattgggaagacaatagcaggcatgctggggatgcggtgggctctatggcttctgaggcggaaagaaccagctggggctctagggggtatccccacgcgccctgtagcggcgcattaagcgcggcgggtgtggtggttacgcgcagcgtgaccgctacacttgccagcgccctagcgcccgctcctttcgctttcttcccttcctttctcgccacgttcgccggctttccccgtcaagctctaaatcgggggctccctttagggttccgatttagtgctttacggcacctcgaccccaaaaaacttgattagggtgatggttcacgtagtgggccatcgccctgatagacggtttttcgccctttgacgttggagtccacgttctttaatagtggactcttgttccaaactggaacaacactcaaccctatctcggtctattcttttgatttataagggattttgccgatttcggcctattggttaaaaaatgagctgatttaacaaaaatttaacgcgaattaattctgtggaatgtgtgtcagttagggtgtggaaagtccccaggctccccagcaggcagaagtatgcaaagcatgcatctcaattagtcagcaaccaggtgtggaaagtccccaggctccccagcaggcagaagtatgcaaagcatgcatctcaattagtcagcaaccatagtcccgcccctaactccgcccatcccgcccctaactccgcccagttccgcccattctccgccccatggctgactaattttttttatttatgcagaggccgaggccgcctctgcctctgagctattccagaagtagtgaggaggcttttttggaggcctagtattaaggaatttggctggttgtttgttgtctttaatggaccgcccgcagggggggtggcatttcagtgtcgggtgacgagcgcgatccggccgggatcctaggaccccaaaagtttgtctgcgtattccagggcggggctcagttgaatctcccgcagcacctctaccagcaggtccgcggtgggctggagaaactcggccgtcccggggcaggcggtcgtcgggggtggaggcgcggcgcccaccccgtgtgccgcgcctggcgtctcctctgggggcgacccgtaaatggttgcagtgatgtaaatggtgtccgcggtccagaccacggtcaaaatgccggccgtggcgctccgggcgctttcgccgcgcgaggagctgacccaggagtcgaacggatacgcgtacatatgggcgtcccacccgcgttcgagcttctggttgctgtcccggcctataaagcggtaggcacaaaattcggcgcgacagtcgataatcaccaacagcccaatgggggtgtgttggataacaacgcctccgcgcggcaggcggtcctggcgctcccggccccgtaccatgatcgcgcgggtgccgtactcaaaaacatgcaccacctgcgcggcgtcgggcagtgcgctggtcagcgaggccctggcgtggcataggctatacgcgatggtcgtctgtggattggacatctcgcggtgggtagtgagtcccccgggccgggttcggtggaactgtaaggggacggcgggttaatatacaatgaccacgttcggatcgcgcagagccgatagtatgtgcttactaatgacgtcatcgcgctcgtggcgctcccggagcggatttaagttcatgcgaaggaattcggaggaggtggtgcgggacatggccacgtacgcgctgttgaggcgcaggttgccgggcgtaaagcagatggcgaccttgtccaggctaaggccctgggagcgcgtgatggtcatggcaagcttggagctgatgccgtagtcggcgtttatggccatggccagctccgtagagtcaatggactcgacaaactcgctgatgttggtgttgacgacggacatgaagccgtgttggtcccgcaagaccacgtaaggcaggggggcctcttccagtaactcggccacgttggccgtcgcgtgccgcctccgcagctcgtccgcaaaggcaaacacccgtgcgtacgtgtatcccatgagcgtataattgtccgtctgcagggcgacggacatcagccccccgcgcggcgagccggtcagcatctcgcagccccggaagataacgttgtccacgtacgtgctaaagggggcgccttcaaatgcctccccaaagagctcttggaggattcggaatctcccgaggaaggcccgcttcagcagcgcaaactgggtgtgaacggcggcggtggtctccggttccccgggggtgtagtggcagtaaaacacgtcgagctgttgttcgtccagccccgcgaaaataacgtcgaggtcgtcgtcgggaaaatcgtccgggcccccgtcccgcggccccagttgcttaaaatcaaacgcacgctcgccgggggcgcctgcgtcggccattaccgacgcctgcgtcggcacccccgaagatttggggcgcagagacagaatctccgccgttagttctcccatgcgggcgtaggcgagggtcctctgggtcgcatccaggcccgggcgctgcagaaagttgtaaaaggagataagcccgctaaatatgagccgcgacaggaacctgtaggcaaactccaccgaagtctccccctgagtctttacaaagctgtcgtcacgcaacactgcctcgaaggcccggaacgtcccactaaacccaaaaaccagttttcgcaggcgcgcggttaccgcgatctggctgttgaggacgtaagtgacgtcgttgcgggccacgaccagctgctgtttgctgtgcacctcgcagcgcatgtgccccgcgtcctggtcctggctctgcgagtagttggtgatgcggctggcgttggccgtgagccacttttcaatagtcaggccgggctggtgtgtcagccgtcggtattcgtcaaactccttgaccgacacgaacgtaagcacggggagggtgaacacgacaaactccccctcacgggtcaccttcaggtaggcgtggagcttggccatgtacgcgctcacctctttgtgggaggagaacaaccgcgtccagccggggaggttggcggggttggtgatgtagttttccgggacgacgaagcgatccacgaactgcatgtgctcctcggtgatgggtaggccgtactccagcaccttcatgaggttaccgaactcgtgctcgatgcaccgtttgttgttaataaaaatggcccagctatacgagaggcgggcgtactcccgcagcgtgcggttgcagatgaggtacgtgagcacgttctcgctctggcggacggaacaccgcagtttctggtgctcgaaggtcgactccagggacgccgtctgtgtcggcgagcccacacacaccaacacgggccgcaggcgggccgcgtactggggggtgtggtacagggcgttaatcatccaccagcaatacaccacggccgtgaggaggtgacgcccaaggagcccggcctcgtcgatgacgatcacgttgctgcgggtaaaggccggcagcgccccgtgggtggccggggccaaccgcgtcagggcgccctcggccaaccccagggtccgttccagggcggccagggcgcgaaactcgttccgcgactcctcgcccccggaggcggccagggtgcgcttcgtgaggtccaaaatcacctcccagtagtacgtcagatctcgtcgctgcaggtcctccagcgaggcggggttgctggtcagggtgtacgggtactgccccagttgggcctggacgtgattcccgcgaaacccaaattcatgaaagatggtgttgatgggtcggctgagaaaggcgcccgagagtttggcgtacatgttttgggccgcaatgcgcgtggcgcccgtcaccacacagtccaagacctcgttgattgtctgcacgcacgtgctctttccggagccagcgttgccggtgataagatacaccgcgaacggaaactccctgaggggcaggcctgcgggggactctaaggccgccacgtcccggaaccactgcagacggggcacttgcgctccgtcgagctgttgttgcgagagctctcggatgcgcttaaggattggctgcaccccgtgcatagacgtaaaatttaaaaaggcctcggccctccctggaacggctggtcggtccccgggttgctgaaggtgcggcgggccgggtctctgtccgtctagctggcgctccccgccggccgccgccatgaccgcaccacgctcgcgggcccccactacgcgtgcgcggggggacacggaagcgctgtgctcccccgaggacggctgggtaaaggttcaccccacccccggtacgatgctgttccgcgagattctccacgggcagctggggtataccgagggccagggggtgtacaacgtcgtccggtccagcgaggcgaccacccggcagctgcaggcggcgatctttcacgcgctcctcaacgccaccacttaccgggacctcgaggcggactggctcggccacgtggcggcccgcggtctgcagccccaacggctggttcgccggtacaggaacgcccgggaggcggatatcgccggggtggccgagcgggtgttcgacacgtggcggaacacgcttaggacgacgctgctggactttgcccacgggttggtcgcctgctttgcgccgggcggcccgagcggcccgtcaagcttccccaaatatatcgactggctgacgtgcctggggttggtccccatattacgcaagcgacaagaagggggtgtgacgcagggtctgagggcgtttctcaagcagcacccgctgacccgccagctggccacggtcgcggaggccgcggagcgcgccggccccgggttttttgagctggcgctggccttcgactccacgcgcgtggcggactacgaccgcgtgtatatttactacaaccaccgccggggcgactggctcgtgcgagaccccatcagcgggcagcgcggagaatgtctggtgctgtggcctcccttgtggaccggggaccgtctggtcttcgattcgcccgtacagcggctgtttcccgagatcgtcgcgtgtcactccctccgggaacacgcgcacgtctgccggctgcgcaataccgcgtccgtcaaggtgctgctggggcgcaagagcgacagcgagcgcggggtggccggcgccgcgcgggtcgttaacaaggtgttgggggaggacgacgagaccaaggccgggtcggccgcctcgcgcctcgtgcggcttatcatcaacatgaagggcatgcgccacgtaggcgacattaacgacactgtgcgtgcctacctcgacgaggccggggggcacctgatagacgccccggccgtcgacggtaccctcccgggattcggcaagggcggaaacagccgcgggtctgcgggccaggaccagggggggcgggcgccgcagcttcgccaggccttccgcacggccgtggttaacaacatcaacggcgtgttggagggctatataaataacctgtttggaaccatcgagcgcctgcgcgagaccaacgcgggcctggcgacccagttgcaggagcgcgaccgcgagctccggcgcgcaacatcgggggccctggagcgccagcagcgcgcggccgacctggcggccgagtccgtgaccgggggatgcggcagccgccctgcgggggcggacctgctccgggccgactatgacattatcgacgtcagcaagtccatggacgacgacacgtacgtcgccaacagttttcagcacccgtacatcccttcgtacgcccaggacctggagcgcctgtcgcgcctctgggagcacgagctggtgcgctgtttcaaaattctgtgtcaccgcaacaaccagggccaagagacgtcgatctcgtactccagcggggcgatcgccgcattcgtcgccccctactttgagtcagtgcttcgggccccccgggtaggcgcgcccatcacgggctccgatgtcatcctgggggaggaggagttatgggatgcggtgtttaagaaaacccgcctgcaaacgtacctgacagacatcgcggccctgttcgtcgcggacgtccagcacgcagcgctgcccccgcccccctccccggtcggcgccgatttccggcccggcgcgtccccgcggggccggtccagatcgcggtcgcccggaagaactgcgcgaggcgcgccggaccagggcgggggcatcgggcaccgggatggccgccgcgacggccgacgatgaggggtcggccgccaccatcctcaagcaggccatcgccggggaccgcagcctggtcgaggcggccgaggcgattagccagcagacgctgctccgcctggcctgcgaggtgcgccaggtcggcgaccgccagccgcggtttaccgccaccagcatcgcgcgcgtcgacgtcgcgcctgggtgccggttgcggttcgttctggacgggagtcccgaggacgcctatgtgacgtcggaggattactttaagcgctgctgcggccagtccagttatcgcggcttcgcggtggcggtcctgacggccaacgaggaccacgtgcacagcctggccgtgccccccctcgttctgctgcaccggttctccctgttcaaccccagggacctcctggactttgagcttgcctgtctgctgatgtacctggagaactgcccccgaagccacgccaccccgtcgacctttgccaaggttctggcgtggctcggggtcgcgggtcgccgcacgtccccattcgaacgcgttcgctgccttttcctccgcagttgccactgggtcctaaacacactcatgttcatggtgcacgtaaaaccgttcgacgacgagttcgtcctgccccactggtacatggcccggtacctgctggccaacaacccgccccccgttctctcggccctgttctgtgccaccccgacaagctcctcattccggctgccggggccgcccccccgctccgactgcgtggcctataaccccgccgggatcatggggagctgctgggcgtcggaggaggtgcgcgcgcctctggtctattggtggctttcggagaccccaaaacgacagacgtcgtcgctgttttatcagttttgttgaattttaggaaataaacccggttttgtttctgtggcctcccgacggatgcgcgtgtccttactccgtcttggtgggtgggtggctgtgtatggcgtcccatctgtgcggggaggggggcaagtcggcacgtattcggacagactcaagcacacacgggggagcgctcttgtctcagggcaatgtttttattggtcaaactcaggcaaacagaaacgacatcttgtcgtcaaagggatacacaaacttccccccctcgccccatactcccgccagcaccccggtaaacaccaactcaatctcgcgcaggatttcgcgcaggtgatgagcgcagtccacgggggggagcacaaggggccgcgggtatagatcgacggggacgccgaccgactccccgcctccgggacagacacgcacgacgcgccgccagtagtgctctgcgtccagcaaggcgccgccgcggaaggcagtggggggcaaggggtcgctggcctcaaagggggacacccgaacgctccagtactccgcgtccaaccgtttattaaacgcgtccaagataaggcggtcgcaggcgtcctccataaggccccgggccgtgagtgcgtcctcctccggcacgcctgccgttgtcaggcccaggacccgtcgcagcgtgtcgcgtacgaccccggccgccgtggtgtacgcgggcccgcggagaggaaatcccccaagatggtcagtgttgtcgcgggagttccagaaccacactcccgcctggctccaggcgactgcgtgggtgtagacgccctcgagggccaggcacagtgggtgccgcagccggaggccgttggccctaagcacggctcccacggccgtctcgatggcccgccgggcgtcctcgatcaccccggaagccgcatccgcgtcttgggggtccacgttaaagacaccccagaacgcacccccatcgcccccgcagaccgcgaacttcaccgagctggccgtctcctcgatctgcaggcagacggcggccattaccccacccaggagctgccgcagcgcagggcaggcgttgcacgtgtccgggaccaggcgctccaagacggccccggcccagggctctgagggagcggccaccaccagcgcgtccagtcttgctaggcccgtccggccgtgggggtccgccagcccgctccccccgaggtcggccagggccgccaggagctgggcgcgaagtccggggaagcaaaaccgcgccgtccagacgggcccgacggccgcgggcgggtctaacagttggatgattttagtggcgggatgccaccgcgccaccgcctcccgcactgcgggcaggaggcatccggctgccgccgaggccacgccgggccaggctcgcggggggaggacgaccctgacccccaccgcgggccaggcccccaggagcgcggcgtaagcggccgcggccccgcgcaccaggtcccgtgccgactcggccgtggccggcacggtgaacgtgggccaacccggaaaccccaggacggcaaagtacgggacgggtcccccccggacctcaaactcgggccccagaaaggcaaagacgggggccagggccccgggggcggcgtggaccgtggtatgccactgccggaaaagggcgacgagcgccggcgcggagaacttctcgccggcgcttacaaagtagtcgtaatcgcggggcagcagcacccgtgccgtgactcgttgcgggtgcccgcgtggccgcaggcccacctcgcacacctcgaccaggtccccgaacgcgccctccttcttgatcggcggaaacgcaagagtctggtattcgcgcgcaaatagcgcggttccggtggtgatgttaacggtcagcgaagcggtggacgcgcactggggggtgtcgcgaatggccgccaggcgcgcccacgccagccgcgcgtcgggatgctcggcaacgcgcgccgccagggccatagggtcgatgtcaatgttggcctccgcgaccaggagagcggcgcgaggggcggcgggcgggccccacgacgctctctcaactttcaccaccagtcccgtgcgtgggtccgagccgatacgcagcggggcgaacagggccaccggcccggtctggcgctccagggccgccaggacgcacgcgtacagcgcccgccacagagtcgggttctccaggggctccagcggggaggcggccggcgtcgtcgcggcgcgggcggccgccacgacggcctggacggagacgtccgcggagccgtagaaatcccgcagctccgtcgcggtgacggagacctccgcaaagcgcgcgcgaccctcccctgcggcgttgcgacatacaaaatacaccagggcgtggaagtactcgcgagcgcgggggggcagccataccgcgtaaagggtaatggcgctgacgctctcctccacccacacgatatctgcggtgtccatcgcacggcccctaaggatcacgggcggtctgtgggtcccatgctgccgtgcctggccgggcccggtgggttgcggaaaccggtgacgggggggggggcggtttttggggttggggtgggaaacggcccgggtccgggggccaacttggcccctcggtgcgttccggcaacagcgccgccggtccgcggacgaccacgtaccgaacgagtgcggtcccgagacttatagggtgctaaagttcaccgccccctgcatcatgggccaggcctcggtggggagctccgacagcgccgcctccaggatgatgtcagcgttggggttggcgctggatgagtgcgtgcgcaaacagcgcccccacgcgggcacgcgtagcttgaagcgcgcgcccgcaaactcccgcttgtgggccataagcagggcgtacagctgcctgtgggtccggcaggcgctgtggtcgatgtggtgggcgtccaacaaccccacgattgtctgtttggtgaggtttttaacgcgccccgccccgggaaacgtctgcgtgcttttggccatctgcacgccaaacagttcgccccagattatcttgaacagcgccaccgcgtggtccgtctcactaacggacccgcgcgggggacagccgcttagggcgtcggcgacgcgcttgacggcttcctccgagagcagaagtccgtcggttacgttacagtggcccagttcgaacaccagctgcatgtagcggtcgtagtggggggtcagcaggtccagcacgtcatcggggccgaaggtcctcccagatcccccggccgccgagtcccaatgcaggcgcgcggccatggtgctgcacaggcacaacagctcccagacaggggttacgttcagggtggggggcagggccacgagctccagctctccggtgacgttgatcgtggggatgacgcccgtggcgtagtggtcatagatccgccgaaatatggcgctgctgcgggtggccatgggaacgcggagacaggcctccagcaacgccaggtaaataaaccgcgtgcgtcccatcaggctgttgaggttgcgcatgagcgcgacaatttccgccggcgcgacatcggaccggaggtatttttcgacgaaaagacccacctcctccgtctcggcggcctgggccggcagcgacgcctcgggatcccggcaccgcagctcccgtagatcgcgctgggccctgagggcgtcgaaatgtacgccccgcaaaaacagacagaagtcctttggggtcagggtatcgtcgtgtccccagaagcgcacgcgtatgcagtttagggtcagcagcatgtgaaggatgttaaggctgtccgagagacacgccagcgtgcatctctcaaagtagtgtttgtaacggaatttgttgtagatgcgcgacccccgccccagcgacgtgtcgcatgccgacgcgtcacagcgccccttgaaccggcgacacagcaggtttgtgacctgggagaactgcgcgggccactggccgcaggaactgaccacgtggttcaggagcatgggcgtaaagacgggctccgagcgcgccccggagccgtccatgtaaatcagtagctcccccttgcggagggtgcgcacccgtcccagggactggtacacggacaccatgtccggtccgtagttcatgggtttcacgtaggcgaacatgccatcaaagtgcaggggatcgaagctgaggcccacggttacgaccgtcgtgtatataaccacgcggtattggccccacgtggtcacgtccccgaggggggtgagcgagtgaagcaacagcacgcggtccgtaaactgacggcagaaccgggccacgatctccgcgaaggagaccgtcgacgaaaaaatgcagatgttatcgcccccgccaaggcgcgcttccagctccccaaagaacgtggccccccgggcgtccggagaggcgtccggagacgggccgctcggcggcccgggcgggcgcagggcagcctgcaggagctcggtccccagacgcgggagaaacaggcaccggcgcgccgaaaacccgggcatggcgtactcgccgaccaccacatgcacgtttttttcgccccggagaccgcacaggaagtccaccaactgcgcgttggcggttgcgtccatggcgatgatccgaggacatgtgcgcagcaggcgtagcattaacgcatccacgcggcccagttgctgcatcgttggcgaatagagctggcccagcgtcgacataacctcgtccagaacgaggacgtcgtagttgttcagaaggttggggcccacgcgatgaaggctttccacctggacgataagtcggtggaaggggcggtcgttcataatgtaattggtggatgagaagtaggtgacaaagtcgaccaggcctgactcagcgaaccgcgtcgccagggtctgggtaaaactccgacgacaggagacgacgagcacactcgtgtccggagagtggatcgcttcccgcagccagcggatcagcgcggtagtttttcccgaccccattggcgcgcggaccacagtcacgcacctggccgtcggggcgctcgcgttggggaaggtgacgggtccgtgctgctgccgctcgatcgttgttttcgggtgaacccggggcacccattcggccaaatcccccccgtataacatccgcgctagcgatacgctcgacgtgtactgttcgcactcgtcgtccccaatgggacgcccggcccccagaggatcccccgactccgcgccccccacgaaaggcatgaccggggcgcggacggcgtggtgggtctggtgtgtgcaggtggcgacgtttgtggtctctgcggtctgcgtcacggggctcctcgtcctggcctctgtgttccgggcacggtttccctgcttttacgccacggcgagctcttatgccggggttaactccacggccgaggtgcgcgggggtgtagccgtgcccctcaggttggacacgcagagccttgtgggcacttatgtaatcacggccgtattgttgttggccgcggccgtgtatgccgtggtcggcgccgtgacctcccgctacgaccgcgccctggacgcgggccgccgtctggctgcggcccgcatggccatgccgcacgccacgctgatcgccggaaacgtctgctcttggttgctgcagatcaccgtcctgctgctggcccatcgcatcagccagctggcccacctggtttacgtcctgcactttgcgtgtctggtgtattttgcggcccatttttgcaccaggggggtcctgagcgggacgtatctgcgtcaggtgcacggcctgatggagctggccccgacccatcatcgcgtcgtcggcccggctcgcgccgtgctgacaaacgccttgctgttgggcgtcttcctgtgcacggccgacgccgcggtatccctgaataccatcgccgcgttcaactttaatttttcggccccgggcatgctcatctgcctgaccgtgctgttcgccattctcgtcgtatcgctgttgttggtggtcgagggggtgttgtgtcactacgtgcgcgtgttggtgggcccccacctgggggccgttgccgccacgggcatcgtcggcctggcctgcgagcactattacaccaacggctactacgtggtggagacgcagtggccgggggcacagacgggagtgcgcgtcgccctcgccctggtcgccgcctttgccctcggcatggccgtgctccgctgcacccgcgcctatctgtatcacaggcggcaccacaccaaattttttatgcgcatgcgcgacacgcgacaccgcgcacattccgccctcaagcgcgtacgcagttccatgcgcggatcgcgagacggccgccacaggcccgcgcccggcagcccgcccgggattcccgaatatgcggaagacccctacgcgatctcatacggcggccagctcgaccggtacggagattccgacggggagccgatttacgacgaggtggcggacgaccaaaccgacgtattgtacgccaagatacaacacccgcggcacctgcccgacgacgagcccatctatgacaccgttggggggtacgaccccgagcccgccgaggaccccgtgtacagcaccgtccgccgttggtagctgtttggttccgttttaataaaccgtttgtgtttaacccgaccgtggtgtatgtctggtgtgtggcgtccgatcccgttactatcaccgtccccccccctcaaccccggcgattgtgggttttttaaaaacgacacgcgtgcgaccgtatacagaacattattttggtttttattcgctatcggacatggggggtggaaactgggtggcggggcaggcgcctccgggggtccgccggtgagtgtggcgcgagggggggtccgacgaacgcaggcgcggtctccccggggcccgcgtaaccacgcgcatatccgggggcacgtagaaattaccttcctcttcggactcgatatccacgacgtcaaagtcgtgggcggtcagcgagacgacctccccgtcgtcggtgatgaggacgttgtttcggcagcagcagggccgggccccggagaacgagaggcccatagctcggcgagcgtgtcgtcgaacgccaggcggctgcttcgctggatggccttatagatctccggatcgatgcggacgggggtaatgatcagggcgatcggaacggcctggttcgggagaatggacgccttgctgggtcctgcggccccgagagccccggcgccgtcctccaggcggaacgttacgccctcctccgcgctggtgcggtgcctgccgataaacgtcaccagatgcgggtggggggggcagtcggggaagtggctgtcgagcacgtagccctgcaccaagatctgcttaaagttcgggtggcgggggttcgcgaagacgggctcgcggcggaccagatccccggagctccaggacacgggggagatggtgtggcgtccgaggtcgggggcgccaaacagaagcacctccgagacaacgccgctatttaactccaccaaggcccgatccgcggcggagcaccgccttttttcgcccgaggcgtgggcctctgaccaggcctggtcttgcgtgacgagagcctcctccgggccggggacgcgcccgggcgcgaagtatcgcacgctgggcttcgggatcgaccggataaatgcccggaacgcctccggggaccggtgtgccatcaagtcctcgtacgcggaggccgtggggtcgctggggtccatggggtcgaaagcgtacttggcccggcatttgacctcgtaaaaggccaggggggtcttggggactggggccaggtagccgtgaatgtcccgaggacagacgagaatatccagggacgccccgaccatccccgtgtgaccgtccatgaggaccccacacgtatgcacgttctcttcggcgaggtcgctgggttcgtggaagataaagcgccgcgtgtcggcgccggcctcgccgccgtcgtccgcgcggcccacgcagtagcgaaacagcaggcttcgggccgtcggctcgttcacccgcccgaacatcaccgccgaagactgtacatccggtcgcaggctggcgttgtgcttcagccactggggcgagaaacacggaccctgggggccccagcggagggtggatgcggtcgtgaggccccgccggagcagggcccatagctggcagtcggcctggttttgcgtggccgcctcgtaaaaccccatgaggggccggggcgccacggcgtccgcggcggccgggggggcgcggcgcgtcaggcgccataggtgccggccgagtccgcggtccaccatacccgcctcctcgaggaccacggccagggaacacagataatccaggcgggcccagaggggaccgatggccagaggggcgcggacgccgcgcagcaacccgcgcaggtggcgctcgaacgtctcggctagtatatgggagggcagcgcgttggggatcaccgacgccgaccacatagagtcaaggtccggggagtcgggatcggcgtccgggtcgcgggcgtgggtgcccccaggagatagcggaatgtccggggtcggaggcccggaggcgtcagaaagtgccggcgacgcggcccggggcttttcgtctgcggtgtcggtggcgtgctgatcacgtggggggttatcgggcgaatgggagctcgggtccacagctgacgtcgtctggggtggggggggcaggggacggaaggtggttgtcagcggaagactgttagggcgggggcgcttgggggggctgtcggggccacgaggggtgtcctcggccagggcccagggacgcttagtcacggtgcgtcccggcggacatgctgggcctaccgtggactccatttccgagacgacgtggggggagcggtggttgagcgcgccgccgggtgaacgctgattctcacgacagcgcgtgccgcgcgcacgggttggtgtgacacaggcgggacaccagcaccaggagaggcttaagctcgggaggcagcgccaccgacgacagtatcgccttgtgtgtgtgctggtaatttatacaccgatccgtaaacgcgcgccgaatcttgggattgcggaggtggcgccggatgccctctgggacgtcatacgccaggccgtgggtgttggtctcggccgagttgacaaacagggctgggtgcagcacgcagcgataggcgagcagggccagggcgaagtccggcgacagctggttgttgaaatactggtaaccgggaaaccgggtcacgggtacgcccaggctcggggcgacgtacacgctaaccaccaactccagcagcgtctggcccagggcgtacaggtcaaccgctagcccgacgtcgtgcttcaggcggtggttggtaaattcggcccgttcgttgttaaggtatttcaccaacagctccgggggctggttatacccgtgacccaccagggtgtgaaagttggctgtggttagggcggtgggcatgccaaacatccggggggacttgaggtccggctcctggaggcaaaactgcccccgggcgatcgtggagttggagttgagggtgacgaggctaaagtcggcgaggacggcccgccggagcgagacggcgtccgaccgcagcatgacgaggatgttggcgcacttgatatccaggtggctgatcccgcaggtggtgtttaaaaacacaacggcacgggccagctccgtgaagcactggtggagggccgtcgagaccgaggggtttgttgtgcgcagggacgccagttggccgatatacttaccgaggtccatgtcgtacgcggggaacactatctgtcgttgttgcagcgagaacccgaggggcgcgatgaagccgcggatgttgtgggtgcggccggcgcgtagagcgcactccccgaccaacagggtcgcgatgagctcaacggcaaaccactccttttcctttatggtcttaacggcaagcttatgttcgcgaatcagttggacttcgccgtatcccccagaccccccgaagcttcgggccccggggatctcgagggtcgtgtagtgtagggcggggttgatggcgaacacggggctgcatagcttgcggatgcgcgtgagggtgaggatgtgcgagggggacgaggggggtgcggttaacgccgcctgggatctgcgcaggggcgggcggttcagtttggccgccgtaccgggcgcctcgggggacgcgcggcgatgagacgagcggctcattcgccatcgggatagtcccgcgcgaagccgctcgcggaggccggatcggtggcggcacccgtgggaggagcgggagacggcggcgttctggagagaggggccgctggggcgcccggaggccccatgggggttggagtgtatgtaggatgcgagccaatccttgaaggaccgttggcgtgcaccttgggggctgaggttagctgccacatgaccagcaggtcgctgtctgcgggactcatccatccttcggccaggtcgccgtctccccacagagaagcgttggtcgctgcctcctcgagttgctcctcctggtccgcaagacgatcgtccacggcgtccaggcgctcaccaagcgccggatcgaggtaccgtcggtgtgcggttagaaagtcacgacgcgccgcttgctcctccacgcgaattttaacacaggtcgcgcgctgtcgcatcatctctaagcgcgcgcgggactttagccgcgcctccaattccaagtgggccgcctttgcagccataaaggcgccaacaaaccgaggatcttgggtgctgacgccctcccggtgcagctgcagggtctggtccttgtaaatctcggctcggaggtgcgtctcggccaggcgtcggcgcagggccgcgtgggcggcatctcggtccattccgccaccctgcgggcgacccgggggtgctctgatagtctcgcgtgcccaaggcccgtgatcggggtacttcgccgccgcgacccgccacccggtgtgcgcgatgtttggtcagcagctggcgtccgacgtccagcagtacctggagcgcctcgagaaacagaggcaacttaaggtgggcgcggacgaggcgtcggcgggcctcacaatgggcggcgatgccctacgagtgccctttttagatttcgcgaccgcgacccccaagcgccaccagaccgtggtcccgggcgtcgggacgctccacgactgctgcgagcactcgccgctcttctcggccgtggcgcggcggctgctgtttaatagcctggtgccggcgcaactaaaggggcgtgatttcgggggcgaccacacggccaagctggaattcctggcccccgagttggtacgggcggtggcgcgactgcggtttaaggagtgcgcgccggcggacgtggtgcctcagcgtaacgcctactatagcgttctgaacacgtttcaggccctccaccgctccgaagcctttcgccagctggtgcactttgtgcgggactttgcccagctgcttaaaacctccttccgggcctccagcctcacggagaccacgggcccccccaaaaaacgggccaaggtggacgtggccacccacggccggacgtacggcacgctggagctgttccaaaaaatgatccttatgcacgccacctactttctggccgccgtgctcctcggggaccacgcggagcaggtcaacacgttcctgcgtctcgtgtttgagatccccctgtttagcgacgcggccgtgcgccacttccgccagcgcgccaccgtgtttctcgtcccccggcgccacggcaagacctggtttctggtgcccctcatcgcgctgtcgctggcctcctttcgggggatcaagatcggctacacggcgcacatccgcaaggcgaccgagccggtgtttgaggagatcgacgcctgcctgcggggctggttcggttcggcccgagtggaccacgttaaaggggaaaccatctccttctcgtttccggacgggtcgcgcagtaccatcgtgtttgcctccagccacaacacaaacgtaagtcctcttttctttcgcatggctctcccaaggggccccgggtcgacccgacccacacccacccacccacatacacacacaaccagacgcgggaggaaagtctgccccgtgggcactgatttttattcgggatcgcttgaggaggcccgggcaacggcccgggcaacggtggggcaactcgtagcaaataggcgactgatgtacgaagagaagacacacaggcgccacccggcgctggtcggggggatgttgtccgcgccgcaccgtcccccgacgacctcttgcagacggtccgtgatgcaaggacggcggggggcctgcagcagggtgaccgtatccacgggatggccaaagagaagcggacacaggctagcatccccctggaccgccagggtacactgggccatcttggcccacagacacggggcgacgcagggacaggactccgttacgacggaggagagccacagtgcgttggcggaatcgatgtggggcggcggggcgcaggactcgcagccccccgggtggttagtgatcctggccaggagccatcccagatggcgggccctgcttcccggtggacagagcgaccccaggtcgctgtccatggcccagcagtagatctggccgctggggaggtgccaccaggcccccgggcccaaggcgcagcacgcgcccggctccgggggggtcttcgcggggaccagatacgcgccatccagctcgccgaccactggctcctccgcgagctgttcggtggttgggtcgggggtttcctccgggggggtggccgcccgtatgcgggcgaacgtgagggtgcacaggagcggggtcagggggtgcgtcacgctccggaggtggacgatcgcgcagtagcggcgctcgcggttaaagaaaaagagggcaaagaaggtgttcgggggcaaccgcagcgccttggggcgcgtcagatacagaaaaatctcgcagaagagggcgcgcccggggtctgggttaggaagggccacctgacacagaggctcggtgaggaccgttagacaccgaaagatcttgagccgctcgtccgcccgaacgacgcgccacacaaagacggagttgacaatgcgcgcgatagagtcgacgtccgtccccaggtcgtcgactctgtcgcgcgtgccgcgagctccggcccgggaatccggccggggcaaggtccccgggggaccaggcggcgccaggggccgccggggtcccagctgcgccatgccgggggcggggggagggcaaaccccagaggcgggggccaacggcgcggggaggagtggatgggcgaggtggccgggggaaggcgcccgctagcgagaacggccgttcccggacgacaccttgcgacaaaacctaaggacagcggcccgcgcgacggggtccgagaggctaaggtaggccgcgatgttaatggtgaacgcaaagccgccgggaaagacaactatgccacagaggcggcgattaaaccccaggcagaggtaggcgtagctttccccgggcaggtattgctcgcagaccctgcgtggggctgtggaggggacggcctccatgaagcgacatttactctgctcgcgtttactgacgtcaccatccatcgccacggcgattggacgattgttaagccgcagcgtgtctccgcttgtgctgtagtagtcaaaaacgtaatggccgtcggagtcggcaaagcgggccgggaggtcgtcgccgagcgggacgacccgccgcccccgaccgccccgtccccccaggtgtgccaggacggccagggcatacgcggtgtgaaaaaaggcgtcgggggcggtcccctcgacggcgcgcatcaggttctcgaggagaatggggaagcgcctggtcacctcccccagccacgcgcgttggtcggggccaaagtcatagcgcaggcgctgtgagattcgcgggccgccctgaagcgcggcccggatggcctggcccagggcccggaggcacgccagatgtatgcgcgcggtaaaggcgacctcggcggcgatgtcaaagggcggcaggacggggcgcgggtggcgcaggggcacctcgagcgcgggaaagcggagcagcagctccgcctgcccagcgggagacagctggtgggggcgcacgacgcgttctgcggcgcaggcctcggtcagggccgtggccagcgccgaggacagcagcggagggcgggcgcgtcgcccgccccacgccactgagttctcgtaggagacgacgacgaagcgctgcttggttccgtagtggtggcgcaggaccacggagatagaacgacggctccacagccagtccggccggtcgccgccggccagggcttcccatccgcgatccaaccactcgaccagcgaccgcggctttgtggtaccaggggtaagggttagaacgtcgttcaggatgtcctcgcccccgggcccgtggggcgctggggccacaaagcggcccccgccggggggctccagacccgccagcaccgcatctgcgtcagccgcccccatggcgcccccgctgacggcctggtgaaccagggcgccctggcggagccccgatgcaacgccacaggccgcacgcccggtccgagcgcggaccgggtggcggcgggtgacgtcctgcactgcccgctgaaccaacgcgaggatctcctcgttctcctgtgcgatggacacgtcctgggccgcggtcgtgtcgccgccgggggccgtcagctgctcctccggggagatgggggggtcggacgccccgacgatgggcgggtctgcgggcgcccccgcgtggggccgggccaagggctgcggacgcggggacgcgctttcccccagacccatggacaggtgggccgcggcctccttcgcggccggcggggcggcggcgccaagcagagcgacgtagcggcacaaatgccgacagacgcgcatgatgcgcgtgctgtcggccgcgtagcgcgtgttgggggggacgagctcgtcgtaactaaacagaatcacgcgggcacagctcgcccccgagccccacgcgaggcgcagcgccgccacggcgtacgggtcatagacgccctgcgcgtcacacaccacgggcagggagacgaacaaccccccggcgctggacgcacgcggaaggaggccagggtgtgccggcacgacgggggccagaagctcccccaccgcatccgcgggcacgtaggcggcaaacgccgtgcaccacggggtacagtcgccggtggcatgagcccgagtctggatttcgacctggaagtttgcggccgtcccgagtccggggcggccgcgcatcagggcggccagagggattcccgcggccgccaggcactcgctggatatgatgacgtgaaccaaagacgagggccgacccgggccgtggccgagatcgtactggacctcgttggccaagtgcgcgttcatggttcggggtgggtgtgggtgtgtaggcgatgcgggtcccccgagtccgcgggaagggcgtgggtttggcgcgcgtatgcgtattcgccaacggaggcgtgcgtgcttatgcgcggcgcgtttcttctgtctccagggaatccgaggccaggactttaacctgctctttgtcgacgaggccaactttattcgcccggatgcggtccagacgattatgggctttctcaaccaggccaactgcaagattatcttcgtgtcgtccaccaacaccgggaaggccagtacgagctttttgtacaacctccgcggggccgccgacgagcttctcaacgtggtgacctatatatgcgatgatcacatgccgagggtggtgacgcacacaaacgccacggcctgttcttgttatatcctcaacaagcccgttttcatcacgatggacggggcggttcgccggaccgccgatttgtttctggccgattccttcatgcaggagatcatcgggggccaggccagggagaccggcgacgaccggcccgttctgaccaagtctgcgggggagcggtttctgttgtaccgcccctcgaccaccaccaacagcggcctcatggcccccgatttgtacgtgtacgtggatcccgcgttcacggccaacacccgagcctccgggaccggcgtcgctgtcgtcgggcggtaccgcgacgattatatcatctttgccctggagcacttttttctccgcgcgctcacgggctcggcccccgccgacatcgcccgctgcgtcgtccacagtctgacgcaggtcctggccttgcatcccggggcgtttcgcggcgtccgggtggcggtcgagggaaatagcagccaggactcggccgtcgccatcgccacgcacgtgcacacagagatgcaccgcctactggcctcggagggggccgacgcgggctcgggccccgagcttctcttctaccactgcgagcctcccgggagcgcggtgctgtacccctttttcctgctcaacaaacagaagacgcccgcctttgaacactttattaaaaagtttaactccgggggcgtcatggcctcccaggagatcgtttccgcgacggtgcgcctgcagaccgacccggtcgagtatctgctcgagcagctgaataacctcaccgaaaccgtctcccccaacactgacgtccgtacgtattccggaaaacggaacggcgcctcggatgaccttatggtcgccgtcattatggccatctaccttgcggcccaggccggacctccgcacacattcgctcccatcacacgcgtttcgtgagcgcccaataaacacacccaggtatgctacgcacgaccacggtgtcgcctgttaaggggggggaagggggtgttggcgggaagcgtgggaacacgggggattctctcacgaccggcaccagtaccacccccctgtgaacacagaaacccaacccaaatcccataaacatacgacacacaggcatattttggaatttcttgggtttttatttatttaggtatgctggggtttctccctggatgcccaccccccacccccccccgtgggtctagccgggccttagggatagcgtataacgggggccatgtctccggaccgcacaacggccgcgccgtcaaaggtgcacacccgaaccacgggagccagggccaaggtgtctcctagttggcccgcgtgggtcagccaggcgacgagcgcctcgtaaagcggcagccttcgctctccatcctgcaccagggccggggcttcggggtgaatgagctgggcggcctcccgcgtgacactctgcatctgcaggagagcgttcacgtacccgtcctgggcacttagcgcaaagagccgggggattagcgtaaggatgatggtggttccctccgtgatcgagtaaaccatgttaaggaccagcgatcgcagctcggcgtttacgggaccgagttgttggacgtccgccagcagcgagaggcgactcccgttgtagtacagcacgttgaggtctggcagccctccggggtttctggggctggggttcaggtcccggatgcccctggccacgagccgcgccacgatttcgcgcgccaggggcgatggaagcggaacgggaaaccgcaacgtgaggtccagcgaatccaggcgcacgtccgtcgcttggccctcgaacacgggcgggacgaggctgatggggtccccgttacagagatctacgggggaggtgttgcgaaggttaacggtgccggcgtgggtgaggcccacgtccaggggacaggcgacgattcgcgtgggaagcacccgggtgatgaccgcggggaagcgccttcggtacgccagcaacaaccccaacgtgtcgggactgacgcctccggagacgaaggattcgtgcgccacgtcggccagcgtcagttgccggcggatggtcggcaggaataccacccgcccttcgcagcgctgcagcgccgccgcatcggggcgcgagatgcccgagggtatcgcgatgtcagtttcaaagccgtccgccagcatggcgccgatccacgcggcagggagtgcagtggtggttcgggtggcgggaggagcgcggtgggggtcagcggcgtagcagagacgggcgaccaacctcgcataggacggggggtgggtcttagggggttgggaggcgacagggaccccagagcatgcgcggggaggtctgtcgggcccagacgcaccgagagcgaatccgtccacggagtcccggtctgggttttatggggcccggccctcggaatcgcggcttgtcggcggggacaaagggggcggggctagggggcttgcggaaacagaagacgcgtgggataaaagaatcgcactaccccaaggaagggcggggcggtttattacagagccagtcccttgagcggggatgcgtcatagacgagatactgcgcgaagtgggtctcccgcgcgtgggcttccccgttgcgggcgctgcggaggagggcggggtcgctggcgcaggtgagcgggtaggcctcctgaaacaggccacacgggtcctccacgagttcgcggcaccccggggggcgcttaaactgtacgtcgctggcggcggtggccgtggacaccgccgaacccgtctccacgatcaggcgctccaggcagcgatgtttggcggcgatgtcggccgacgtaaagaacttaaagcaggggctgagcaccggcgaggccccgttgaggtggtaggccccgttatagagcaggtccccgtacgaaaatcgctgcgacgcccacgggttggccgtggccgcaaaggcccgggacgggtcgctctggccgtggtcgtacatgagggcggtgacatccccctccttgtcccccgcgtaaacgcccccggcggcgcgtccccgggggttgcagggccggcggaagtagttgacgtcggtcgacacgggggtggcgataaactcacacacggcgtcctggccgtggtccatccctgcgcgccgcggcacctgggcgcacccgaacacggggacgggctgggccggccccaggcggtttcccgccacgaccgcgttccgcaggtacacggctgccgcgttgtccaggagagggggagccccgcggcccaggtaaaagttttggggaaggttgcccatgtcggtgacggggttgcggacggttgccgtggccacgacggcggtgtagcccacgcccaggtccacgttcccgcgcggctgggtgagcgtgaagtttacccccccgccagtttcgtgccgggccacctggagctggcccaggaagtacgcctccgacgcgcgctccgagaacagcatgttctcagtcacaaagcggtcctgtcggacgacggtgaacccaaacccgggatggaggcccgtcttgagctgatgatgcaaggccacgggactgatcttgaagtaccccgccatgagcgcgtaggtcagcgcgttctccccggccgcgctctcgcggacgtgctgcacgacgggctgtcggatcgacgaaaagtagttggcccccagagccggggggaccagggggacctgccgcgacaggtcgcgcagggccggggggaaattgggcgcgttcgccacgtggtcggccccggcgaacagcgcgttgacgggaagggggtaaaaatagtcgccattttggatggtatggtccagatgctggggggccatcagcaggattccggcgtgcaacgccccgtcgaatatgcgcatgttggtggtggacgcggtgttggcgcccgcgtcgggcgccgccgagcagagcagcgccgttgtgcgttcggccatgttgtgggccagcacctgcagcgtgagcatggcgggcccgtccactaccacgcgcccgttgtgaaacatggcgttgaccgtgttggccaccagattggccgggtgcagggggtgcgcggggtccgtcacggggtcgctggggcactcctcgccgggggcgatctccgggaccaccatgttctgcagggtggcgtatacgcggtcgaagcgaacccccgcggtgcagcagcggccccgcgagaaggcgggcaccatcacgtagtagtaaatcttgtggtgcacggtccagtccgccccccggtgcggccggtcatccgcggcgtccgcggctcgggcctgggtgttgtgcagcagctggccgtcgttgcggttgaagtccgcggtcgccacgttacatgccgccgcgtacacggggtcgtggccccccgcgctaacccggcagtcgcgatggcggtccagggccgcgcgccgcatcagggcgtcacagtcccacacgaggggtggcagcagcgccgggtctcgcattaggtgattcagctcggcttgcgcctgcccgcccagctccgggccggtcagggtaaagtcatcaaccagctgggccagggcctcgacgtgcgccaccaggtcccggtacacggccatgcactcctcgggaaggtctcccccgaggtaggtcacgacgtacgagaccagcgagtagtcgttcacgaacgccgcgcaccgcgtgttgttccagtagctggtgatgcactggacaacgagccgggccagggcgcagaagacgtgctcgctgccgtgtatggcggcctgcagcaggtaaaacaccgccgggtagttgcggtcgtcgaacgccccgcgaacggcggcgatggtggcgggggccatggcgtggcgtcccacccccagctccaggccccgggcgtcccggaacgccgccggacatagcgccaggggcaagttgccgttcaccacgcgccaggtggcctggatctcccccgggccggccgggggaacgtccccccccggcagctccacgtcggccacccccacgaagaagtcgaacgcggggtgcagctcaagagccaggttggcgttgtcgggctgcataaactgctccggggtcatctggccttccgcgacccatcggacccgcccgtgggccaggcgctgcccccaggcgttcaaaaacagctgctgcatgtctgcggcggggccggccggggccgccacgtacgccccgtacggattggcggcttcgacggggtcgcggttaaggcccccgaccgccgcgtcaacgttcatcagcgaagggtggcacacggtcccgatcgcgtgttccagagacaggcgcagcacctggcggtccttcccccaaaaaaacagctggcggggcgggaaggcgcggggatccgggtggccgggggcggggactaggtccccggcgtgcgcggcaaaccgttccatgaccggattgaacaggcccaggggcaggacgaacgtcaggtccatggcgcccaccagggggtagggaacgttggtggcggcgtagatgcgcttctccagggcctccagaaagaccagcttctcgccgatggacaccagatccgcgcgcacgcgcgtcgtctggggggcgctctcgagctcgtccagcgtctgccggttcaggtcgagctgctcctcctgcatctccagcaggtggcggcccacgtcgtccagacttcgcacggccttgcccatcacgagcgccgtgaccaggttggccccgttcaggaccatctcgccgtacgtcaccggcacgtcggcttcggtgtcctccactttcaggaaggactgcaggaggcgctgtttgatcggggctgtggtgactagcaccccgtcgaccggccgcccgcgcgtgtcggcatgcgtcagacggggcacggccacggagggctgcgtggccgtggtgaggtccacgagccaggcctcgacggcctcccggcggtggcccgccttgcccaggaaaaagctcgtctcgcagaagcttcgctttagctcggcgaccagggtcgcccgggccaccctggtggccaggcggccgttgtccaggtatcgttgcatcggcaacaacaaagccaggggcggcgccttttccagcagcacgtgcagcatctggtcggccgtgccgcgctcaaacgccccgaggacggcctggacgttgcgagcgagctgttggatggcgcgcaactggcgatgcgcgctgatacccgtcccgtccagggcctcccccgtgagcagggcgatggcctcggtggccaggctgaaggcggcgttcagggcccggcggtcgataatcttggtcatgtaattgtgtgtgggttgctcgatggggtgcgggccgtcgcgggcaatcagcggctggtggacctcgaactgtacgcgcccctcgttcatgtaggccagctccggaaacttggtacacacgcacgccaccgacaacccgagctccagaaagcgcacgagcgacagggtgttgcaatacgaccccagcagggcgtcgaactcgacgtcgtacaggctgtttgcatcggagcgcacgcgggaaaaaaaatcgaacaggcgtcgatgcgacgccacctcgatcgtgctaaggagggacccggtcggcaccatggccgcggcataccggtatcccggagggtcgcggttgggagcggccatggggtcgcgtggagatcggctgtctctagcgatattggcccggggaggctaagatccaccccaacgcccggccacccgtgtacgtgcccgacggcccaaggtccaccgaaagacacgacggacccggacccaaagaggcgggggatgctgtgtgagaggccgggtgtcggtcgggggggaaaggcaccgggagaaggctgcggcctcgttccaggagaacccagtgtccccaacagacccggggacgtgggatccccggccttatatacccccccccgccccacccccgttagaacgcgacgggtgcattcaagatggccctggtccaaaagcgtgccaggaagaaattggcagaggcggcaaagctgtccgccgccgccacccacatcgaggccccggccgcacaggctatccccagggcccgtgtgcgcaggggatcggtgggtggcagcatttggttggtggcgataaagtggaaaagcccgtccggactgaaggtctcgtgggcggcggcgaacaaggcacacagggccgtgcctcccaaaaacacggacatcccccaaaacacgggcgccgacaacggcagacgatccctcttgatgttaacgtacaggaggagcgcccgcaccgcccacgtaacgtagtagccgacgatggcggccaggatacaggccggcgccaccacccttccggtcagcccgtaatacatgcccgctgccaccatctccaacggcttcaggaccaaaaacgaccaaaggaacagaatcacgcgctttgaaaagaccggctgggtatggggcggaagacgcgagtatgccgaactgacaaaaaaatcagaggtgccgtacgaggacaatgaaaactgttcctccagcggcagttctccctcctcccccccgaaggcggcctcgtcgaccagatctcgatccaccagaggaaggtcatcccgcatggtcatggggtgtgcggtggaggtggggagaccgaaaccgcaaagggtcgcttacgtcagcaggatcccgagatcaaagacacccgggttcttgcacaaacaccacccgggttgcatccgcggaggcgagtgttttgataaggccgttccgcgccttgatataacctttgatgttgaccacaaaacccggaatttacgcctacgccccaatgcccacgcaagatgaggtaggtaacccccccgtgggtgtgacgttgcgtttagttcattggaggccaaggggaaaaatggggtggggaggaaacggaaaacccagtaggccgtgtcgggaacacgcccggggttgtcctcaaaaggcagggtccatactacggaagccgtcgttgtattcgagacctgcctgtgcgacgcacgtcggggttgcctgtgtccggttcggcccccaccgcgtgcggcacgcacgaggacgagtccgcgtgctttattggcgttccaagcgttgccctccagtttctgttgtcggtgttcccccatacccacgcccacatccaccgtagggggcctctgggccgtgttacgtcgccgcccgcgatggagcttagctacgccaccaccatgcactaccgggacgttgtgttttacgtcacaacggaccgaaaccgggcctactttgtgtgcggggggtgtgtttattccgtggggcggccgtgtgcctcgcagcccggggagattgccaagtttggtctggtcgttcgagggacaggcccagacgaccgcgtggtcgccaactatgtacgaagcgaactccgacaacgcggcctgcaggacgtgcgtcccattggggaggacgaggtgtttctggacagcgtgtgtcttctaaacccgaacgtgagctccgagctggatgtgattaacacgaacgacgtggaagtgctggacgaatgtctggccgagtactgcacctcgctgcgaaccagcccgggtgtgctaatatccgggctgcgcgtgcgggcgcaagacagaatcatcgagttgtttgaacacccaacgatagtcaacgtttcctcgcactttgtgtataccccgtccccatacgtgttcgccctggcccaggcgcacctcccccggctcccgagctcgctggaggccctggtgagcggcctgtttgacggcatccccgccccacgccagccacttgacgcccacaacccgcgcacggatgtggttatcacgggccgccgcgccccacgacccatcgccgggtcgggggcggggtcggggggcgcgggcgccaagcgggccaccgtcagcgagttcgtgcaagtcaaacacattgaccgcgtgggccccgctggcgtttcgccggcgcctccgccaaacaacaccgactcgagttccctggtgcccggggcccaggattccgccccgcccggccccacgctaagggagctgtggtgggtgttttatgccgcagaccgggcgctggaggagccccgcgccgactctggcctcacccgcgaggaggtacgtgccgtacgtgggttccgggagcaggcgtggaaactgtttggctccgcgggggccccgcgggcgtttatcggggccgcgttgggcctgagccccctccaaaagctggccgtttactactatatcatccaccgagagaggcgcctgtcccccttccccgcgctagtccggctcgtaggccggtacacacagcgccacggcctgtacgtccctcggcccgacgacccagtcttggccgatgccatcaacgggctggttcgcgacgcgctggcggccggaaccacagccgagcagctcctcatgttcgaccttctccccccaaaggacgtgccggtgggaagcgacgtgcaggccgacagcaccgctctgctgcgctttatagaatcgcaacgtctcgccgtccccgggggggtgatctcccccgagcacgtcgcgtaccttggtgcgttcctgagcgtgctgtacgctggccgcgggcgcatgtccgcagcaacgcacaccgcgcggctgacaggggtgacctccctggtgctagcggtgggtgacgtggaccgtctttccgcgtttgaccgcggagcggcgggcgcggccagccgcacgcgggccgccgggtacctggatgtgcttcttaccgttcgtctcgctcgctccaaacacggacagtctgtgtaacagaccccaataaacgtatgtcgctaccacacccttgtgtgtcaatggacgcctctccgggggggaagggaaaacaaagaggggctgggggagcggcaccactggggcctgaacaaacaaacaaaccacagacacggttacagtttattcggtcgggcggataaacggccgaagccacgccccctttattcgcgtctccaaaaaaacgggacacttgtccggagaacctttaggatgccagccagggcggcggtaatcataaccacgcccagcgcagaggcggccagaaacccgggcgcaattgcggccacgggctgcgtgtcaaaggctagcaaatgaatgacggttccgtttggaaatagcaacaaggccgtggacggcacgtcgctcgaaaacacgctcggggcgccctccgtcggcccggcggcgatttgctgctgtgtgttgtccgtatccaccagcaacacagacatgacctccccggctggggtgtagcgcataaacacggcccccacgagccccaggtcgcgctggttttgggtgcgcaccagccgcttggactcgatatcccgggtggagccttcgcatgtcgcggtgaggtaggttaggaacagtgggcgtcggacgtcgacgccggtgagcttgtagccgatcccccggggcagaggggagtgggtgacgacgtagctggcgttgtgggtgatgggtaccaggatccgtggctcgacgttggcagactgccccccgcaccgatgtgaggcctcagggacgaaggcgcggatcagggcgttgtagtgtgcccagcgcgtcagggtcgaggcgaggccgtgggtctgctgggccaggacttcgaccggggtctcggatcgggtggcttgagccagcgcgtccaggataaacacgctctcgtctagatcaaagcgcagggaggccgcgcatggcgaaaagtggtccggaagccaaaagagggttttctggtggtcggcccgggccagcgcggtccggaggtcggcgttggtcgctgcggcgacgtcggacgtacacagggccgatgctatcagaaggctccggcgggcgcgttcccgctgcaccgccgaggggacgcccgccaagaacggctgccggaggacagccgaggcgtaaaatagcgcccggtggacgaccggggtggtcagcacgcggccccctagaaactcggcatacagggcgtcgatgagatgggctgcgctgggcgccactgcgtcgtacgccgaggggctatccagcacgaaggccagctgatagcccagcgcgtgtaatgccaagctctgttcgcgctccagaatctcggccaccaggtgctggagccgagcctctagctgcaggcgggccgtgggatccaagactgacacattaaaaaacacagaatccgcggcacagcccgcggccccgcgggcggccaacccggcaagcgcgcgcgagtgggccaaaaagcctagcaggtcggagaggcagaccgcgccgtttgcgtgggcggcgttcacgaaagcaaaacccgacgtcgcgagcagccccgttaggcgccagaagagaggggggcgcgggccctgctcggcgcccgcgtcccccgagaaaaactccgcgtatgcccgcgacaggaactgggcgtagttcgtgccctcctccgggtagccgcccacgcggcggagggcgtccagcgcggagccgttgtcggcccgcgtcagggaccctaggacaaagacccgataccgggggccgcccgggggcccgggaagagcccccggggggttttcgtccgcggggtccccgacccgatctagcgtctggcccgcggggaccaccatcacttccaccggagggctgtcgtgcatggatatcacgagccccatgaattcccgcccgtagcgcgcgcgcaccagcgcggcatcgcacccgagcaccagctcccccgtcgtccagatgcccacgggccacgtcgaggccgacggggagaaatacacgtacctacctggggatctcaacaggccccgggtggccaaccaggtcgtggacgcgttgtgcaggtgcgtgatgtccagctccgtcgtcgggtgccgccgggccccaaccggcggtcgggggggcggtgtatcacgcggcccgcttgggtggctcgccgtcgccacgttgtctccccgcgggaacgtcagggcctcggggtcagggacggccgaaaacgttacccaggcccgggaacgcagcaacacggaggcgactggattgtacaagagacccttaaggggggcgaccgaggggggaggctgggcggtcggctcgaccgtggtgggggcgggcaggctcgcgttcgggggccggccgagcaggtaggtcttcgggatgtaaagcagctggccggggtcccgcggaaactcggccgtggtgaccaatacaaaacaaaagcgctcctcgtaccagcgaagaaggggcagagatgccgtagtcaggtttagttcgtccggcggcgccagaaatccgcgcggtggtttttgggggtcgggggtgtttggcagccacagacgcccggtgttcgtgtcgcgccagtacatgcggtccatgcccaggccatccaaaaaccatgggtctgtctgctcagtccagtcgtggacctgaccccacgcaacgcccaaaataataacccccacgaaccataaaccattccccatgggggaccccgtccctaacccacggggcccgtggctatggcagggcttgccgccccgacgttggctgcgagccctgggccttcacccgaacttggggggtggggtggggaaaaggaagaaacgcgggcgtattggccccaatggggtctcggtggggtatcgacagagtgccagccctgggaccgaaccccgcgtttatgaacaaacgacccaacacccgtgcgttttattctgtctttttattgccgtcatagcgcgggttccttccggtattgtctccttccgtgtttcagttagcctcccccatctcccgggcaaacgtgcgcgccaggtcgcagatcgtcggtatggagccgggggtggtgacgtgggtctggaccatcccggaggtaagttgcagcagggcgtcccggcagccggcgggcgattggtcgtaatccaggataaagacgtgcatgggacggaggcgtttggccaagacgtccaaggcccaggcaaacacgttgtacaggtcgccgttgggggccagcaactcgggggcccgaaacagggtaaataacgtgtccccgatatggggtcgtgggcccgcgttgctctggggctcggcaccctggggcggcacggccgtccccgaaagctgtccccaatcctcccgccacgacccgccgccctgcagataccgcaccgtattggcaagcagcccgtaaacgcggcgaatcgcggccagcatagccaggtcaagccgctcgccggggcgctggcgtttggccaggcggtcgatgtgtctgtcctccggaagggcccccaacacgatgtttgtgccgggcaaggtcggcgggatgagggccacgaacgccagcacggcctggggggtcatgctgcccataaggtatcgcgcggccgggtagcacaggagggcggcgatgggatggcggtcgaagatgagggtgagggccgggggcggggcatgtgagctcccagcctcccccccgatatgaggagccagaacggcgtcggtcacggcataaggcatgcccattgttatctgggcgcttgtcattaccaccgccgcgtccccggccgatatctcaccctggtcgaggcggtgttgtgtggtgtagatgttcgcgattgtctcggaagcccccagcacctgccagtaagtcatcggctcgggtacgtagacgatatcgtcgcgcgaacccagggccaccagcagttgcgtggtggtggttttccccatcccgtgaggaccgtctatataaacccgcagtagcgtgggcattttctgctccaggcggacttccgtggcttcttgctgccggcgagggcgcaacgccgtacgtcggttgctatggccgcgagaacgcgcagcctggtcgaacgcagacgcgtgttgatggcaggggtacgaagccatacgcgcttctacaaggcgcttgccgaagaggtgcgggagtttcacgccaccaagatctgcggcacgctgttgacgctgttaagcgggtcgctgcagggtcgctcggtgttcgaggccacacgcgtcaccttaatatgcgaagtggacctgggaccgcgccgccccgactgcatctgcgtgttcgaattcgccaatgacaagacgctgggcggggtttgtgtcatcatagaactaaagacatgcaaatatatttcttccggggacaccgccagcaaacgcgagcaacgggccacggggatgaagcagctgcgccactccctgaagctcctgcagtccctcgcgcctccgggtgacaagatagtgtacctgtgccccgtcctggtgtttgtcgcccaacggacgctccgcgtcagccgcgtgacccggctcgtcccgcagaaggtctccggtaatatcaccgcagtcgtgcggatgctccagagcctgtccacgtatacggtccccatggagcctaggacccagcgagcccgtcgccgccgcggcggcgccgcccgggggtctgcgagcagaccgaaaaggtcacactctggggcgcgcgacccgcccgagtcagcggcccgccagttaccacccgccgaccaaacccccgcctccacggagggcgggggggtgcttaagaggatcgcggcgctcttctgcgtgcccgtggccaccaagaccaaaccccgagccgcctccgaatgagagtgtttcgttccttccccctccccccgcgtcagacaaaccctaaccaccgcttaagcggcccccgcgaggtccgaagactcatttggatccggcgggagccacccgacaacagcccccgggttttcccacgccagacgccggtccgctgtgccatcgcgccccctcatcccaccccccatcttgtccccaaataaaacaaggtctggtagttaggacaacgaccgcagttctcgtgtgttattttcgctctccgcctctcgcagatggacccgtactgcccatttgacgctctggacgtctgggaacacaggcgcttcatagtcgccgattcccgaaacttcatcacccccgagttcccccgggacttttggatgtcgcccgtctttaacctcccccgggagacggcggcggagcaggtggtcgtcctacaggcccagcgcacagcggctgccgctgccctggagaacgccgccatgcaggcggccgagctccccgtcgatatcgagcgccggttacgcccgatcgaacggaacgtgcacaagatcgcaggcgccctggaggcgctggagacggcggcggccgccgccgaagaggcggatgccgcgcgcggggatgagccggcgggtgggggcgacgggggggcgcccccgagtctggccgtcgcggagatggaggtccagatcgtgcgcaacgacccgccgctacgatacgacaccaacctccccgtggatctgctacacatggtgtacgcgggccgcggggcgaccggatcgtcgggggtggtgttcgggacctggtaccgcactatccaggaccgcaccatcacggactttcccctgaccacccgcagtgccgactttcgggacggccgtatgtccaagaccttcatgacggcgctggtactgtccctgcagtcgtgcggccggctgtatgtgggccagcgccactattccgccttcgagtgcgccgtgttgtgtctctacctgctgtaccgaaacacgcacggggccgccgacgatagcgaccgcgctccggtcacgttcggggatctgctgggccggctgccccgctacctggcgtgcctggccgcggtgatcgggaccgagggcggccggccacagtaccgctaccgcgacgacaagctccccaagacgcagttcgcggccggcgggggccgctacgaacacggagcgctggcgtcgcacatcgtgatcgccacgctgatgcaccacggggtgctcccggcggccccgggggacgtcccccgggacgcgagcacccacgttaaccccgacggcgtggcgcaccacgacgacataaaccgcgccgccgccgcgttcctcagccggggccacaacctattcctgtgggaggaccagactctgctgcgggcaaccgcgaacaccataacggccctgggcgttatccagcggctcctcgcgaacggcaacgtgtacgcggaccgcctcaacaaccgcctgcagctgggcatgctgatccccggagccgtcccttcggaggccatcgcccgtggggcctccgggtccgactcgggggccatcaagagcggagacaacaatctggaggcgctatgtgccaattacgtgcttccgctgtaccgggccgacccggcggtcgagctgacccagctgtttcccggcctggccgccctgtgtcttgacgcccaggcggggcggccggtcgggtcgacgcggcgggtggtggatatgtcatcgggggcccgccaggcggcgctggtgcgcctcaccgccctggaactcatcaaccgcacccgcacaaaccccacccccgtgggggaggttatccacgcccacgacgccctggcgatccaatacgaacaggggcttggcctgctggcgcagcaggcacgcattggcttgggctccaacaccaagcgtttctccgcgttcaacgttagcagcgactacgacatgttgtactttttatgtctggggttcattccacagtacctgtcggcggtttagtgggtggtgggcgaggggggagggggcattagggagaaagaacaagagcctccgttgggttttctttgtgcctgtactcaaaaggtcataccccgtaaacggcgggctccagtcccggcccggcggttggcgtgaacgcaacggcgggagctgggttagcgtttagtttagcattcgctctcgcctttccgcccgccccccgaccgttgcgccttttttttttttcgtccaccaaagtctctgtgggtgcgcgcatggcagccgatgccccgggagaccggatggaggagcccctgccagacagggccgtgcccatttacgtggctgggtttttggccctgtatgacagcggggactcgggcgagttggcattggatccggatacggtgcgtgcggccctgcctccggataacccactcccgattaacgtggaccaccgcgctggctgcgaggtggggcgggtgctggccgtggtcgacgacccccgcgggccgttttttgtgggactgatcgcctgcgtgcaactggagcgcgtcctcgagacggccgccagcgctgcgattttcgagcgccgcgggccgccgctctcccgggaggagcgcctgttgtacctgatcaccaactacctgccctcggtctccctggccacaaaacgcctggggggcgaggcgcaccccgatcgcacgctgttcgcgcacgtcgcgctgtgcgcgatcgggcggcgcctcggcactatcgtcacctacgacaccggtctcgacgccgccatcgcgccctttcgccacctgtcgccggcgtctcgcgagggggcgcggcgactggccgccgaggccgagctcgcgctgtccggacgcacctgggcgcccggcgtggaggcgctgacccacacgctgctttccaccgccgttaacaacatgatgctgcgggaccgctggagcctggtggccgagcggcggcggcaggccgggatcgccggacacacctacctccaggcgagcgaaaaattcaaaatgtggggggcggagcctgtttccgcgccggcgcgcgggtataagaacggggccccggagtccacggacataccgcccggctcgatcgctgccgcgccgcagggtgaccggtgcccaatcgtccgtcagcgcggggtcgcctcgcccccggtactgccccccatgaaccccgttccggcatcgggcaccccggcccccgcgccgcccggcgacgggagctacctgtggatcccggcctcccattacaaccagctcgtcgccggccacgccgcgccccaaccccagccgcattccgcgtttggtttcccggctgcggcgggggccgtggcctatgggcctcacggcgcgggtctttcccagcattaccctccccacgtcgcccatcagtatcccggggtgctgttctcgggacccagcccactcgaggcgcagatagccgcgttggtgggggccatagccgcggaccgccaggcgggcggtcagacggccgcgggagaccctggggtccgggggtcgggaaagcgtcgccggtacgaggcggggccgtcggagtcctactgcgaccaggacgaaccggacgcggactacccgtactaccccggggaggctcgaggcgggccgcgcggggtcgactctcggcgcgcggcccgccagtctcccgggaccaacgagaccatcacggcgctgatgggggcggtgacgtctctgcagcaggaactggcgcacatgcgggctcggaccagcgccccctatggaatgtacacgccggtggcgcactatcgccctcaggtgggggagccggaaccaacaacgacccacccggccctttgtcccccggaggccgtgtatcgccccccaccacacagcgccccctacggtcctccccagggtccggcgtcccatgcccccactcccccgtatgccccagctgcctgcccgccaggcccgccaccgcccccatgtccttccacccagacgcgcgcccctctaccgacggagcccgcgttcccccccgccgccaccggatcccaaccggaggcatccaacgcggaggccggggcccttgtcaacgccagcagcgcagcacacgtggacgttgacacggcccgcgccgccgatttgttcgtctctcagatgatgggggcccgctgattcgccccggtctttggtaccatgggatgtcttactgtatatctttttaaataaaccaggtaataccaaataagacccattggtgtatgttctttttttattgggaggcgcgggtaggcgggtagctttacaatgcaaaagccttcgacgtggaggaaggcgtggggggggaatcggcactgaccaagggggtccgttttgtcacgggaaaggaaagaggaaacaggccgcggacacccgggggagtttatgtgttcccttttctttcttcccacacacacaaaaggcgtaccaaacaaacaaaccaaaagatgcacatgcggtttaacacccgtggtttttatttacaacaaaccccccgtcacaggtcgtcctcgtcggcgtcaccgtctttgttgggaacttgggtgtagttggtgttgcggcgcttgcgcatgaccatgtcggtgaccttggcgctgagcagcgcgctcgtgcccttcttcttggccttgtgttccgtgcgctccatggcagacaccagggccatgtaccgtatcatctcccgggcctcggctagcttggcctcgtcaaagtcgccgccctcctcgccctccccggacgcgtccgggttggtggggttcttgagctccttggtggttagcgggtacagggccttcatggggttgctctgcagccgcatgacgtagcgaaaggcgaagaaagccgccgccaggccggccaggaccaacagacccacggccagcgccccaaaggggttggacatgaaggaggacacgcccgacacggccgataccacgccgcccacgatgcccatcaccaccttgccgaccgcgcgccccaggtcgcccatcccctcgaagaacgcgcccaggcccgcgaacatggcggcgttggcgtcggcgtggatgaccgtgtcgatgtcggcgaagcgcaggtcgtgcagctggttgcggcgctggacctccgtgtagtccagcaggccgctgtccttgatctcgtggcgggtgtacacctccagggggacaaactcgtgatcctccagcatggtgatgttgaggtcgatgaaggtgctgacggtggtgatgtcggcgcggctcagctggtgggagtacgcgtactcctcgaagtacacgtagcccccgccgaaggtgaagtagcgccggtgtcccacggtgcacggctcgatcgcatcgcgcgtcagccgcagctcgttgttctcccccagctgcccctcgaccaacgggccctggtcttcgtaccgaaagctgaccagggggcggctgtagcaggccccgggccgcgagctgatgcgcatcgagttttggacgatcacgttgtccgcggcgaccggcacgcacgtggagacggccatcacgtcgccgagcatccgcgcgctcacccgccggcccacggtggccgaggcgatggcgttggggttcagcttgcgggcctcgttccacagggtcagctcgtgattctgcagctcgcaccacgcgatggcaacgcggcccaacatatcgttgacatggcgctgtatgtggttgtacgtaaactgcagccgggcgaactcgatggaggaggtggtcttgatgcgctccacggacgcgttggcgctggccccgggcggcgggggcgtggggtttgggggcttgcggctctgctctcggaggtgttcccgcacgtacagctccgcgagcgtgttgctgagaaggggctggtacgcgatcagaaagcccccattggccaggtagtactgcggctggcccaccttgatgtgcgtcgcgttgtacctgcgggcgaagatgcggtccatggcgtcgcgggcgtccttgccgatgcagtcccccaggtccacgcgcgagagcgggtactcggtcaggttggtggtgaaggtggtggatatggcgtcggaggagaatcggaaggagccgccgtactcggagcgcagcatctcgtccacctcctgccacttggtcatggtgcagaccgacgggcgctttggcacccagtcccaggccacggtgaacttgggggtcgtgagcaggttccgggtggtcggcgccgtggcccgggccttggtggtgaggtcgcgcgcgtagaagccgtcaacctgcttgaagcggtcggcggcgtagctggtgtgttcggtgtgcgacccctcccggtagccgtaaaacggggacatgtacacaaagtcgccagtcgccagcacaaactcgtcgtacgggtacaccgagcgcgcgtccacctcctcgacgatgcagtttaccgtcgtcccgtaccggtggaacgcctccacccgcgaggggttgtacttgaggtcggtggtgtgccagccccggctcgtgcgggtcgcggcgttggccggtttcagctccatgtcggtctcgtggtcgtcccggtgaaacgcggtggtctccaggttgttgcgcacgtacttggccgtggaccgacagacccccttggcgttgatcttgtcgatcacctcctcgaaggggacgggggcgcggtcctcaaagatccccataaactgggagtagcggtggccgaaccacacctgcgaaacggtgacgtctttgtagtacatggtggccttgaacttgtacggggcgatgttctccttgaagaccaccgcgatgccctccgtgtagttctgaccctcgggccgggtcgggcagcggcgcggctgctcgaactgcaccaccgtggcgcccgtggggggtgggcacacgtaaaagtttgcatcggtgttctccgccttgatgtcccgcaggtgctcgcgcagggtggcgtggcccgcggcgacggtcgcgttgtcgccggcggggcgcggcggcggtgggtttttcggttttttgttcttcttcggtttcgtgtcccccgttggggcggggccaggggcgggcggcgccggagtggcaggtcccccgttcgccgcctgggtcgcggccgcgaccccaggcgtgccgggggaactcggagccgccgacgccaccaggacccccagcgtcaaccccaagagcgcccatacgacgaaccaccggcacccccgcgcgggggcgccctggcgcatggcgggactacgggggcccgtcgtgccccccgtcaggtagcctgggggcgaggtgctggaggaccgagtagaggatcgagaaaacgtctcggtcgtagaccacgaccgaccgggggccgatacagccgtcgggggcgctctcgacgatggccaccagcggacagtcggagtcgtacgtgagatatacgccgggcgggtaacggtaacgaccttcggaggtcgggcggctgcagtccgggcggcgcaactcgagctccccgcaccggtagaccgaggcaaagagtgtggtggcgataatcagctcgcgaatatatcgccaggcggcgcgctgagtgggcgttattccggaaatgccgtcaaaacagtaaaacctctgaaattcgctgacggcccaatcagcacccgagccccccgcccccatgatgaaccgggcgagctcctccttcaggtgcggcaggagccccacgttctcgacgctgtaatacagcgcggtgttggggggctgggcgaagctgtgggtggagtgatcaaagaggggcccgttgacgagctcgaagaagcgatgggtgatgctggggagcagggccgggtccacctggtgtcgcaggagagacgctcgcatgaaccggtgcgcgtcgaacacgcccggcgccgagcggttgtcgatgaccgtgcccgcgcccgccgtcagggcgcagaagcgcgcgcgcgccgcaaagccgttggcgaccgcggcgaacgtcgcgggcagcacctcgccgtggacgctgacccgcagcatcttctcgagctccccgcgctgctcgcggacgcagcgccccaggctggccaacgaccgcttcgtcaggcggtccgcgtacagccgccgtcgctcccgcacgtccgcggccgcttgcgtggcgatgtccccccacgtctcgggcccctgccccccgggcccgcggcgacggtcttcgtcctcgcccccgcccccgggagctcccaacccccgtgccccttcctctacggcgacacggtccccgtcgtcgtcggggcccgcgccgcccttgggcgcgtccgccgcgccccccgcccccatgcgcgccagcacgcgacgcagcgcctcctcgtcgcactgttcggggctgacgaggcgccgcaagagcggcgtcgtcaggtggtggtcgtagcacgcgcggatgagcgcctcgatctgatcgtcgggtgacgtggcctgaccgccgattattagggcgtccaccatatccagcgccgccaggtggctcccgaacgcgcgatcgaaatgctccgcccgccgcccgaacagcgccagttccacggccaccgcggcggtctcctgctgcaactcgcgccgcgccagcgcggtcaggttgctggcaaacgcgtccatggtggtctggccggcgcggtcgccggacgcgagccagaatcgcaattcgctgatggcgtacaggccgggcgtggtggcctgaaacacgtcgtgcgcctccagcagggcgtcggcctccttgcggaccgagtcgttctcgggcgacgggtggggctgcccgtcgccccccgcggtccgggccagcgcatggtccaacacggagagcgcccgcgcgcggtcggcgtccgacagcccggcggcgtggggcaggtaccgccgcagctcgttggcgtccagccgcacctgcgcctgctgggtgacgtggttacagatacggtccgccaggcggcgggcgatcgtcgccccctggttcgccgtcacacacagttcctcgaaacagaccgcgcaggggtgggacgggtcgctaagctccggggggacgataaggcccgaccccaccgcccccaccataaactcccgaacgcgctccagcgcggcggtggcgccgcgcgagggggtgatgaggtggcagtagtttagctgctttagaaagttctcgacgtcgtgcaggaaacacagctccatatggacggtcccgccatacgtatccagcctgacccgttggtgatacggacagggtcgggccaggcccatggtctccgtgaaaaacaccgcgacgtctcccgcggtcgcgaacgtctccaggctgcccaggagccgctcgccctcgcgccacgcgtactctagcagcaactccagggtgaccgacagcggggtgagaaaggccccggcctgggcctccaggcccggcctcagacgacgccgcagcgcccgcacctgaagcgcgttcagcttcagttgggggagcttcccccgtccgatgtgggggtcgcaccgccggagcagctctatctgaaacacataggtctgcacctgtccgagcagggctaacaacttttgacgggccacggtgggctcggacaccggggcggccatctcgcggcgccgatctgtaccgcggccggagtatgcggtggaccgaggcggtccgtacgctacccggcgtctggctgagccccggggtccccctattcggggcggcctcccgcgggcccgccgaccggcaagccgggagtcggcggcgcgtgcgtttctgttctattcccagacaccgcggagaggaatcacggcccgcccagagatatagacacggaacacaaacaagcacggatgtcgtagcaataatttattttacacacattccccgccccgccctaggttcccccaccccccaacccctcacagcatatccaacgtcaggtctccctttttgtcggggggcccctccccaaacgggtcatccccgtggaacgcccgtttgcggccggcaaatgccggtcccggggcccccgggccgccgaacggcgtcgcgttgtcgtcctcgcagccaaaatccccaaagttaaacacctccccggcgttgccgagttggctgactagggcctcggcctcgtgcgccacctccagggccgcgtccgtcgaccactcgccgttgccgcgctccagggcacgtgcggtcagctccatcatctcctcgcttaggtactcgtcctccaggagcgccagccagtcctcgatctgcagctgttgggtgcggggccccaggcttttcacggtcgccacgaacacgctactggcgacggccgccccgccctcggagataatgccccggagctgctcgcacagcgagctttcgtgcgctccgccgccgaggctcgaggccgcgcacacaaacccggcccggggacaggccaggacgaacttgcgggtgcggtcaaaaataaggagcgggcacgcgtttttgccgcccatcaggctggcccagttcccggcctgaaacacacggtcgttgccggccatgccgtagtatttgctgatgctcaaccccaacacgaccatggggcgtgccgccatgacgggccgcagcaggttgcagctggcgaacatggaggtccacgcgcccggatgcgcgtccacggcgtccatcagcgcgcgggccccggcctccaggcccgccccgccctgcgcggaccacgcggccgccgcctgcacgctggggggacggcgggaccccgcgatgatggccgtgagggtgttgatgaagtacgtcgagtgatcgcagtaccgcagaatctggtttgccatgtagtacatcgccagctcgctcacgttgttgggggccaggttaataaagttgatcgcgccgtagtccagggaaaactttttaatgaacgcgatggtctcgatgtcctcgcgcgacaggagccgggcgggaagctggttgcgttggagggccgtccagaaccactgcgggttcggctggttggaccccgggggcttgccgttggggaagatggccgcgtggaactgcttcagcagaaagcccagcggtccgaggaggatgtccacgcgcttgtcgggcttctggtaggcgctctggaggctggcgacccgcgccttggcggcctcggacgcgttggcgctcgcgcccgcgaacaacacgcggctcttgacgcgcagctccttgggaaaccccagggtcacgcgggcaacgtcgccctcgaagctgctctcggcgggggccgtctggccggccgtcaggctgggggcgcagatagccgcaccctccgagagcgcgaccgtcagcgttttggccgacagaaacccgttgttaaacatgtccatcacgcgccgccgcagcaccggttggaattgattgcgaaagttgcgcccctcgaccgactgcccggcgaacaccccgtggcactggctcagggccaggtcctggtacacggcgaggttggatcgccgcccgagaagctgaagcagggggcacggcccgcacgcgtacgggtccagcgtcagggacatggcgtggttggcctcgcccagaccgtcgcgaaacttgaagttcctcccctccaccaggttgcgcatcagctgctccacctcgcggtccacgacctgcctgacgttgttcaccaccgtatgcagggcctcgcggttggtgatgatggtctccagccgccccatggccgtggggaccgcctggtccacgtactgcagggtctcgagttcggccatgacgcgctcggtcgccgcgcggtacgtctcctgcatgatggtccgggcggtctcggatccgtccgcgcgcttcagggccgagaaggcggcgtagtttcccagcacgtcgcagtcgctgtacatgctgttcatggtcccgaagacgccgatggctccgcgggcggcgctggcgaacttgggatggcgcgcccggaggcgcatgagcgtcgtgtgtacgcaggcgtggcgcgtgtcgaaggtgcacaggttacagggcacgtcggtctggttggagtccgcgacgtatcgaaacacgtccatctcctggcgcccgacgatcacgccgccgtcgcagcgctccaggtaaaacagcatcttggccagcagcgccggggaaaacccacacagcatggccaggtgctcgccggcaaattcctgggttccgccgacgaggggcgcggtgggccgaccctcgaacccgggcaccacgtgtccctcgcggtccacctgtgggttggccgccacgtgggtcccgggcacgaggaagaagcggtaaaaggagggtttgctgtggtcctttgggtccgccgggccggcgtcgtccacctcggtgagatggagggccgagttggtgctaaataccatggcccccacgagtcccgcggcgcgcgccaggtacgccccgacggcgttggcgcgggccgcggccgtgtcctggccctcgaacagcggccacgcggagatgtcggtgggcggctcgtcaaagacggccatcgacacgatagactcgagggccagggcggcgtctccggccatgacggaggccaggcgctgttcgaacccgcccgcagggcccttgccgccgccgtcgcgcccgccccgcggggtcttaccctggctggcttcgaaggccgtgaacgtaatgtcggcggggagggcggcgccctcgtggttttcgtcaaacgccaggtgggcggccgcgcgggccacggcgtccacgtttcggcatcgcagtgccacggcggcgggtcccacgaccgcctcgaacaggaggcggtggagggggcggttaaaaaacggaagcgggtaggtaaaattctccccgatcgatcggtggttggcgttgaacggctctgcgatgacacggctaaaatccggcatgaacagctgcaacgggtacacgggtatgcggtgcacctccgccccgcctatggttaccttgtccgagcctcccaggtgcagaaaggtgttgttgatgcacacggcctccttgaagccctcggtaacgaccagatacaggagggcgcggtccgggtccaggccgaggcgctcacacagcgcctcccccgtcgtctcgtgtttgaggtcgccgggccggggggtgtagtccgaaaagccaaaatggcggcgtgcccgctcgcagagtcgcgtcaggttcggggcctgggtgctggggtccaggtgccggccgccgtgaaagacgtacacggacgagctgtagtgcgagggcgtcagtttcagggacaccgcggtacccccgagccccgtcgtgcgagaacccacgaccacggccacgttggcctcaaagccgctctccacggtcaggcccacgaccaggggcgccacggcgacgtcggcatcgccgctgcgcgccgacagtaacgccagaagctcgatgccttcggacggacacgcgcgagcgtacacgtatcccaggggcccgggggggaccttgatggtggttgccgtcttgggctttgtctccatgtccttctgtcaatcggtccgcgaacggaggtaatcccggcacgacgacggacgcccgacaaggtatgtctcccgagcgtcaaaatccgggggggggggcggcgacggtcaaggggagggttggagaccggggttggggaatgaatccctacccttcaccgacaaccccccgggtaatcacggggtgccgatgaaccccggcggccggcaacgcggggtccctgcgagaggcacagatgcttacggtcaggtgctccgggtcgggtgcgtctggtatgcggttggtatatgtacactttacctgggggcgtgcctggccgccccagcccctcccacgccctgcgcgtcatcagccggtgggcgtggccgctattataaaaaaagtgagaacgcgaagcgttcgcactttgtcctaataatatatatattattaggacaaagtgcgaacgcttcgcgttctcactttttttataatagcggccacgcccaccggctacgtcacgctcctgtcggccgccggcggtccataagcccggccggccgggccgacgcgaataaaccgggccgccggccggggcgccgcgcagcagctcgccgcccggatccgccagacaaacaaggcccttgcacatgccggcccgggcgagcctgggggtccggtaattttgccatcccacccaagcggctttttgggtttttctcttcccccctccccacatcccccctctttaggggttcgggtggtaacaaccgcgatgttttccggtggcggcggcccgctgtcccccggaggaaagtcggcggccagggcggcgtccgggttttttgcgcccgccggccctcgcggagccggccggggacccccgccttgcttgaggcaaaacttttacaacccctacctcgccccagtcgggacgcaacagaagccgaccgggccaacccagcgccatacgtactatagcgaatgcgatgaatttcgattcatcgccccgcgggtgctggacgaggatgcccccccggagaagcgcgccggggtgcacgacggtcacctcaagcgcgcccccaaggtgtactgcgggggggacgagcgcgacgtcctccgcgtcgggtcgggcggcttctggccgcggcgctcgcgcctgtggggcggcgtggaccacgccccggcggggttcaaccccaccgtcaccgtctttcacgtgtacgacatcctggagaacgtggagcacgcgtacggcatgcgcgcggcccagttccacgcgcggtttatggacgccatcacaccgacggggaccgtcatcacgctcctgggcctgactccggaaggccaccgggtggccgttcacgtttacggcacgcggcagtacttttacatgaacaaggaggaggtcgacaggcacctacaatgccgcgccccacgagatctctgcgagcgcatggccgcggccctgcgcgagtccccgggcgcgtcgttccgcggcatttccgcggaccacttcgaggcggaggtggtggagcgcaccgacgtgtactactacgagacgcgccccgctctgttttaccgcgtctacgtccgaagcgggcgcgtgctgtcgtacctgtgcgacaacttctgcccggccatcaagaagtacgagggtggggtcgacgccaccacccggttcatcctggacaaccccgggttcgtcaccttcggctggtaccgtctcaaaccgggccggaacaacacgctagcccagccgcgggccccgatggccttcgggacatccagcgacgtcgagtttaactgtacggcggacaacctggccatcgaggggggcatgagcgacctaccggcatacaagctcatgtgcttcgatatcgaatgcaaggcggggggggaggacgagctggcctttccggtggccgggcacccggaggacctggtcatccagatatcctgtctgctctacgacctgtccaccaccgccctggagcacgtcctcctgttttcgctcggttcctgcgacctccccgaatcccacctgaacgagctggcggccaggggcctgcccacgcccgtggttctggaattcgacagcgaattcgagatgctgttggccttcatgacccttgtgaaacagtacggccccgagttcgtgaccgggtacaacatcatcaacttcgactggcccttcttgctggccaagctgacggacatttacaaggtccccctggacgggtacggccgcatgaacggccggggcgtgtttcgcgtgtgggacataggccagagccacttccagaagcgcagcaagataaaggtgaacggcatggtgaacatcgacatgtacgggattataaccgacaagatcaagctctcgagctacaagctcaacgccgtggccgaagccgtcctgaaggacaagaagaaggacctgagctatcgcgacatccccgcctactacgccgccgggcccgcgcaacgcggggtgatcggcgagtactgcatacaggattccctgctggtgggccagctgttttttaagtttttgccccatctggagctctcggccgtcgcgcgcttggcgggtattaacatcacccgcaccatctacgacggccagcagatccgcgtctttacgtgcctgctgcgcctggccgaccagaagggctttattctgccggacacccaggggcgatttaggggcgccgggggggaggcgcccaagcgtccggccgcagcccgggaggacgaggagcggccagaggaggagggggaggacgaggacgaacgcgaggagggcgggggcgagcgggagccggagggcgcgcgggagaccgccggccggcacgtggggtaccagggggccagggtccttgaccccacttccgggtttcatgtgaaccccgtggtggtgttcgactttgccagcctgtaccccagcatcatccaggcccacaacctgtgcttcagcacgctctccctgagggccgacgcagtggcgcacctggaggcgggcaaggactacctggagatcgaggtgggggggcgacggctgttcttcgtcaaggctcacgtgcgagagagcctcctcagcatcctcctgcgggactggctcgccatgcgaaagcagatccgctcgcggattccccagagcagccccgaggaggccgtgctcctggacaagcagcaggccgccatcaaggtcgtgtgtaactcggtttacgggttcacgggagtgcagcacggactcctgccgtgcctgcacgttgccgcgacggtgacgaccatcggccgcgagatgctgctcgcgacccgcgagtacgtccacgcgcgctgggcggccttcgaacagctcctggccgatttcccggaggcggccgacatgcgcgcccccgggccctattccatgcgcatcatctacggggacacggactccatctttgtgctgtgccgcggcctcacggccgccgggctgacggccgtgggcgacaagatggcgagccacatctcgcgcgcgctgtttctgtcccccatcaaactcgagtgcgaaaagacgttcaccaagctgctgctgatcgccaagaaaaagtacatcggcgtcatctacgggggtaagatgctcatcaagggcgtggatctggtgcgcaaaaacaactgcgcgtttatcaaccgcacctccagggccctggtcgacctgctgttttacgacgataccgtatccggagcggccgccgcgttagccgagcgccccgcagaggagtggctggcgcgacccctgcccgagggactgcaggcgttcggggccgtcctcgtagacgcccatcggcgcatcaccgacccggagagggacatccaggactttgtcctcaccgccgaactgagcagacacccgcgcgcgtacaccaacaagcgcctggcccacctgacggtgtattacaagctcatggcccgccgcgcgcaggtcccgtccatcaaggaccggatcccgtacgtgatcgtggcccagacccgcgaggtagaggagacggtcgcgcggctggccgccctccgcgagctcgacgccgccgccccaggggacgagcccgccccccccgcggccctgccctccccggccaagcgcccccgggagacgccgttgcatgccgaccccccgggaggcgcgtccaagccccgcaagctgctggtgtccgagctggccgaggatcccgcatacgccattgcccacggcgtcgccctgaacacggactattacttctcccacctgttgggggcggcgtgcgtgacattcaaggccctgtttgggaataacgccaagatcaccgagagtctgttaaaaaggtttattcccgaagtgtggcaccccccggacgacgtggccgcgcggctccgggccgcagggttcggggcggtgggtgccggcgctacggcggaggaaactcgtcgaatgttgcatagagcctttgatactctagcatgagccccccgtcgaagctgatgtccctcattttacaataaatgtctgcggccgacacggtcggaatctccgcgtccgtgggtttctctgcgttgcgccggaccacgagcacaaacgtgctctgccacacgtgggcgacgaaccggtaccccgggcacgcggtgagcatccggtctatgagccggtagtgcaggtgggcggacgtgccgggaaagatgacgtacagcatgtggcccccgtaagtggggtccgggtaaaacaacagccgcgggtcgcacgccccgcctccgcgcaggatcgtgtggacgaaaaaaagctcgggttggccaagaatcccggccaagaggtcctggaggggggcgttgtggcggtcggccaacacgaccaaggaggccaggaaggcgcgatgctcgaatatcgtgttgatctgctgcacgaaggccaggattagggcctcgcggctggtggcggcgaaccgcccgtctcccgcgttgcacgcgggacagcaacccccgatgcctaggtagtagcccatcccggagagggtcaggcagttgtcggccacggtctggtccagacagaagggcagcgagacgggagtggtcttcaccaggggcaccgagagcgagcgcacgatggcgatctcctcggagggcgtctgggcgagggcggcgaaaaggccccgatagcgctggcgctcgtgtaaacacagctcctgtttgcgggcgtgaggcggcaggctcttccgggaggcccgacgcaccacgcccagagtcccgccggccgcagaggagcgcgaccgccggcgctccttgccgtgatagggcccgggccgggagccgcggcgatgggggtcggtgtcatacataggtacacagggtgtgctccagggacaggagcgagatcgagtggcgtctaagcagcgcgcccgcctcacggacaaatgtggcgagcgcggtgggctttggtacaaatacctgatacgtcttgaaggtgtagatgagggcacgcaacgctatgcagacacgcccctcgaactcgttcccgcaggccagcttggccttgtggagcagcagctcgtcgggatgggtggcggggggatggccgaacagaacccaggggtcaacctccatctccgtaatggcgcacatggggtcacagaacatgtgcttaaagatggcctcgggccccgcggcccgaagcaggctcacaaaccggcccccgtccccgggctgcgtctcggggtcagcctcgagctggtcgacgacgggtacgatacagtcgaagaggctcgtgttgttttccgagtagcggaccacggaggcccggagtctgcgcagggccagccagtaagcacgcaccagtaacaggttacacagcaggcattctccgccggtgcgcccgcgcccccggccgtgtttcagcacggtggccatcagagggcccaggtcgaggtcgggctgggcatcgggttcggtaaactgcgcaaagcgcggagccacgtcgcgcgtgcgtgccccgcgatgcgcttcccaggactggcggaccgtggcgcgacgggcctccgcggcagcgcgcagctggggccccgactcccagacggcgggggtgccggcgaggagcagcaggaccagatccgcgtacgcccacgtatccggcgactcctccggctcgcggtccccggcgaccgtctcgaattccccgttgcgagcggcggcgcgcgtacagcagctgtccccgcccccgcgccgaccctccgtgcagtccaggagacgggcgcaatccttccagttcatcagcgcggtggtgagcgacggctgcgtgccggatcccgccgaccccgccccctcctcgcccccggaggccaaggttccgatgagggcccgggtggcagactgcgccaggaacgagtagttggagtactgcaccttggcggctcccggggagggcgagggcttgggttgcttctgggcatgccgcccgggcaccccgccgtcggtacggaagcagcagtggagaaaaaagtgccggtggatgtcgtttatggtgagggcaaagcgtgcgaaggagccgaccagggtcgccttcttggtgcgcagaaagtggcggtccatgacgtacacaaactcgaacgcggccacgaagatgctagcggcgcagtggggcgcccccaggcatttggcacagagaaacgcgtaatcggccacccactgaggcgagaggcggtaggtttgcttgtacagctcgatggtgcggcagaccagacagggccggtccagcgcgaaggtgtcgatggccgccgcggaaaagggcccggtgtccaaaagcccctccccacagggatccgggggcgggttgcggggtcctccgcgcccgcccgaaccccctccgtcgcccgcccccccgcgggcccttgagggggcggtgaccacgtcggcggcgacgtcctcgtcgagcgtaccgacgggcggcacacctatcacgtgactggccgtcaggagctcggcgcagagagcctcgttaagagccaggaggctgggatcgaaggccacatacgcgcgctcgaacgcccccgccttccagctgctgccgggggactcttcgcacaccgcgacgctcgccaggaccccggggggcgaagttgccatggctgggcgggaggggcgcacgcgccagcgaactttacgggacacaatccccgactgcgcgctgcggtcccagaccctggagagtctagacgcgcgctacgtctcgcgagacggcgcgcatgacgcggccgtctggttcgaggatatgacccccgccgagctggaggttgtcttcccgactacggacgccaagctgaactacctgtcgcggacgcagcggctggcctccctcctgacgtacgccgggcctataaaagcgcccgacgacgccgccgccccgcagaccccggacaccgcgtgtgtgcacggcgagctgctcgcccgcaagcgggaaagattcgcggcggtcattaaccggttcctggacctgcaccagattctgcggggctgacgcgcgtgctgttgggcgggacggttcgcgaaccctttggtgggtttacgcgggcacgcacgctcccatcgcgggcgccatggcgggactgggcaagccctacaccggccacccaggtgacgccttcgagggtctcgttcagcgaattcggcttatcgtcccatctacgttgcggggcggggacggggaggcgggcccctactctccctccagcctcccctccaggtgcgcctttcagtttcatggccatgacgggtccgacgagtcgtttcccatcgagtatgtactgcggcttatgaacgactgggccgaggtcccgtgcaacccttacctgcgcatacagaacaccggcgtgtcggtgctgtttcaggggttttttcatcgcccacacaacgcccccgggggcgcgattacgccagagcggaccaatgtgatcctggggtccaccgagacgacggggttgtccctcggcgacctggacaccatcaaggggcggctcggcctggatgcccggccgatgatggccagcatgtggatcagctgctttgtgcgcatgccccgcgtgcagctcgcgtttcggttcatgggccccgaagatgccggacggacgagacggatcctgtgccgcgccgccgagcaggctattacccgtcgccgccgaacccggcggtcccgggaggcgtacggggccgaggccgggctgggggtggccggaacgggtttccgggccaggggggacggttttggcccgctccccttgttaacccaagggccctcccgcccgtggcaccaggccctgcggggtcttaagcacctacggattggcccccccgcgctcgttttggcggcgggactcgtcctgggggccgctatttggtgggtggttggtgctggcgcgcgcctataaaaaaggacgcaccgccgccctaatcgccagtgcgttccggacgccttcgccccacacagccctcccgaccgacacccccatatcgcttcccgacctccggtcccgatggccgtcccgcaatttcaccgccccagcaccgttaccaccgatagcgtccgggcgcttggcatgcgcgggctcgtcttggccaccaataactctcagtttatcatggataacaaccacccacacccccagggcacccaaggggccgtgcgggagtttctccgcggtcaggcggcggcactgacggaccttggtctggcccacgcaaacaacacgtttaccccgcagcctatgttcgcgggcgacgcaccggccgcctggttgcggcccgcgtttggcctgcggcgcacctattcaccttttgtcgttcgagaaccttcgacgcccgggaccccgtgaggcccagggagttccttctggggtgttttaatcaataaaagaccacaccaacgcacgagccttgcgtttaatgtcgtgtttattcaagggagtgggatagggttcgacggttcgaaacttaacacaccaaataatcgagcgcgtctagcccagtaacatgcgcacgtgatgtaggctggtcagcacggcgtcgctgtgatgaagcagcgcccggcgggtccgctgtaactgctgttgtaggcggtaacaggcgcggatcagcaccgccagggcgctacgaccggtgcgttgcacgtagcgtcgcgacagaactgcgtttgccgatacgggcggggggccgaattgtaagcgcgtcacctcttgggagtcatcggcggataacgcactgaatggttcgttggttatgggggagtgtggttccccagggagtgggtcgagcgcctcggcctcggaatccgagaggaacaacgaggtggcgtcggagtcttcgtcgtcagagacatacagggtctgaagcagcgacacgggcgggggggtagcgtcgatgtgtagcgcgagggaggatgcccacgaagacaccccagacaaggagctgcccgtgcgtggatttgtggaagacgcggaagccgggacggatgggcggttttgcggtgcccggaaccgaaccgccggatactccccgggtgctacatgcccgttttggggctggggttggggctggggttggggctggggttggggctggggttggggctggggttggggctggggttggggttggggttggggctggggttggggttggggctggggctggggctggggctggggctggggctggggctggggctggggctggggctggggctggggctggggctggggctggggctggggctggggttggggcgcggacaggcggctgacggtcaaatgcccccgggggcgcgcagatgtggtgggcgtggccaccggctgccgtgtagtggggcggcgggaaaccgggcctccgggcgtaacaccgccctccagcgtcaagtatgtggggggcgggcctgacgtcgggggcggggtgacgggttggaccgcgggaggcgggggagagggacctgcgggagaggatgaggtcggctcggccgggttgcggcctaaaacaggggccgtggggtcggcggggtcccagggtgaagggagggattcccgcgattcggacagcgacgcgacagcggggcgcgtaaggcgccgctgcggcccgcctacgggaaccctggggggggttggcgcgggacccgaggttagcggggggcggcggttttcgcccccgggcaaaaccgtgccggttgcgaccgggggcggaacgggatcgatagggagagcgggagaagcctggccggcggactggggaccgagcgggaggggcacaccagacaccaaagcgtggggcgctggctctgggggtttgggaggggccggggggcgcgcgaaatcggtaaccggggcgaccgtgtcggggagggcaggcggccgccaaccctgggtggtcgcggaagcctgggtggcgcgcgccagggagcgtgcccggcggtgtcggcgcgcgcgcgacccggacgaagaagcggtagaagcgcgggaggaggcgggggggcggggggcggtggcatcggggggcgccggggaactttggggggacggcaagcgccggaagtcgtcgcgggggcccacgggcgccggccgcgtgctttcggccgggacgcccggtcgtgcttcgcgagccgtgactgccggcccagggggccgcggtgcacactgggacgtggggacggactgatcggcggtgggcgaaagggggtccggggcaaggaggggcgcggggccgccggagtcgtcagacgcgagctcctccaggccgtgaatccatgcccacatgcgaggggggacgggctcgccgggggtggcgtcggtgaatagcgtgggggccaggcttccgggccccaacgagccctccgccccaacaaggtccgccgggccgggggtcgggttcgggaccgaggggctctggtcgtcgggggcgcgctggtacaccggatgccccgggaatagctcccccgacaggagggaggcgtcgaacggccgcccgaggatagctcgcgcgaggaaggggtcctcgtcggtggcgctcgcggcgaggacgtcctcgccgcccgccacaaacgggagctcctcggtggcctcgctgccaacaaaccgcatgtcgggggggccgggggggtccgggttttcccacaacaccgcgaccggggtcatggagatgtccacgagcaccaggcacggcgggccccgggcgaggggccgctcggcgatgagcgcggacaggcgcgggagctgtgccgccagacacgcgttttcgatcgggttaaggtcggcgtgcaggaggcggacggcccacgtctcgatgtcggacgacacggcatcgcgcaaggcggcgtccggcccgcgagcgcgtgagtcaaacagcgtgaggcacagctccagttccgactcgcgggaaaaggccgtggtgttgcggagcgccacgacgacgggcgcgcccaggagcactgccgccagcaccaggtccatggccgtaacgcgcgccgcgggggtgcggtgggtggcggcggccggcacggcgacgtgctggcccgtgggccggtagagggcgttggggggagcggggggtgacgcctcgcgcccccccgaggggctcagcgtctgcccagattccagacgcgcggtcagaagggcgtcgaaactgtcatactctgtgtagtcgtccggaaacatgcaggtccaaagagcggccagcgcggtgcttgggagacacatgcgcccgaggacgctcaccgccgccagcgcctgggcgggactcagctttcccagcgcggcgccgcgctcggttcccagctcggggaccgagcgccagggcgccagggggtcggtttcggacaacttgccgcggcgccagtctgccagccgcgtgccgaacatgaggccccgggtcggagggcctccggccgaaaacgctggcagcacgcggatgcgggcgtctggatgcggggtcaggcgctgcacgaatagcatggaatctgctgcgttctgaaacgcacgggggagggtgagatgcatgtactcgtgttggcggaccagatccaggcgccaaaaggtgtaaatgtgttccggggagctggccaccagcgccaccagcacgtcgttctcgttaaaggaaacgcggtgcctagtggagctctggggtccgagcggcggccccggggccgccgcgtcacccccccattccagctgggcccagcgacacccaaactcgcgcgtgagagtggtcgcgacgagggcgacgtagagctcggccgccgcatccatcgaggccccccatctcgcctggcggtggcgcacaaagcgtccgaagagctgaaagttggcggcctgggcgtcgctgagggccagctgaagccggttgatgacggtgaggacgtacatggccgtgacggtcgaggccgactccagggtgtccgtcggaagcggggggcgaatgcatgccgcctcgggacacatcagcagcgcgccgagcttgtcggtcacggccgggaagcagagcgcgtactgcagtggcgttccatccgggaccaaaaagctgggggcgaacggcctatccagcgtactggtggcctcgcgcagcaccaggggccccgggcctccgctcactcgcaggtacgcctcgccccggcggcgcagcatctgcgggtcggcctcttggccgggtggggcggacgcccgggcgcgggcgtctagggcgcgaagatccacgagcaggggcgcgggcgcggccgccgcgcccgcgcccgtctggcctgtggccttggcgtacgcgctatataagcccatgcggcgttggatgagctcccgcgcgccccggaactcctccaccgcccatggggccaggtccccggccaccgcgtccaattccgccaacaggccccccagggtgtcaaagttcatctcccaggccacccttggcaccacctcgtcccgcagccgggcgctcaggtcggcgtgttgggccacgcgccccccgagctcctccacggccccggcccgctcggcgctcttggcgcccaggacgccctggtacttggcgggaaggcgctcgtagtcccgctgggctcgcagccccgacacagtgttggtggtgtcctgcagggcgcgaagctgctcgcatgccgcgcgaaatccctcgggcgatttccaggcccccccgcgaacgcggccgaagcgaccccatacctcgtcccactccgcctcggcctcctcgaaagacctccgcagggcctcgacgcggcgacgggtgtcgaagagcgactgcaggcgcgcgccctgtcgcgtcaggaggcccgggccgtcgccgctggccgcgcttagcgggtgcgtctcaaaggtgcgctgggcatgttccaaccaggcgaccgcctgcacgtcgagctcgcgcgccttctccgtctggtccaacagaatctcgacctgatccgcgatctcctccgccgagcgcgcctggtccagcgtcttggccacggtcgccgggacggcaaccaccttcagcagggtcttcagattggccagaccctcggcctcgagctgggcccggcgctcgcgcgcggccagcacctcccgcaaccccgccgtgacccgctcggtggcttcggcgcgctgctgtttggcgcgcaccacggcgtccttggtatcggccaggtcctgtcgggtcacgaatgcgacgtagtcggcgtacgccgtgtccttcacggggctctggtccacgcgctccagcgccgccacacacgccaccagcgcgtcctcgctcgggcagggcagggtgacccctgcccggacaagctcggcggccgccgccgggtcgttgcgcaccgcggatatctcctccgcggcggcggccaggtccagcgccacgcttccgatcgcgcgccgcgcgtcggcccggagggcgtccaggcgatcgcggatatccacgtactcggcgtagcccttttgaaaaaacggcacgtactggcgcagggccggcacgccccccaagtcttccgacaggtgtaggacggcctcgtggtagtcgataaacccgtcgttcgcctgggcccgctccagcagcccccccgcgagccgcagaagccgcgccaggggctcggtgtccacccgaaacatgtcggcgtacgtgtcggccgcggccccgaaggccgcgctccagtcgatgcggtgaatggctgcgagcggggggagcatggggtggcgctggttctcgggggtgtatgggttaaacgcaagggccgtctccagggcaagggtcaccgccttggcgttggttcccagcgcctgctcggcccgctttcggaagtcccgggggttgtagccgtgcgtgcccgccagcgcctgcaggcgacggagctcgaccacgtcaaactcggcaccgctttccacgcggtccagcacggcctccacgtcggcggcccagcgctcgtggctactgcgggcgcgctgggccgccatcttctctctgaggtcggcggtggcggcctcaagttcgtcggcgcggcgtcgcgtggcgccgatgacctttcccagctcctgcagggcgcgcccgctgggggagtggtccccggccgtcccttcggcgtgcaacaggcccccgaacctgccctcgtggcccgcgaggctttcccgcgcgccggtggtcgcgcgcgtcgcggcctggatcagggaggcatgctctccctccggttggttggcggcccggcgcacctggacgacaaggtcggcggcagccgaccctaaggtcgtgagctgggcgatggccccccgcgcgtccagggccaaccgagtcgccttgacgtatcccgcggcgctgtcggccatggccgctaggaaggccaggggggaggccgggtcgctggcggccgcgcccagggccgtcactgcgtcgaccaggacgcggtgcgcccgcacggccgcatccaccgtcgacgcggggtctgccgtcgcgacggcggcgctgccggcgttgatggcgttcgagacggcgtgggctatgatcggggcgtgatcggcgaagaactgcaagagaaacggagtctcgggggcgttggcgaacaggttcttcagcaccaccacgaagctgggatgcaagccggacagagccgtcgccgtgtccggagtcgggtgctccagggcatctcggtactgccccagcagcccccacatgtccgcccgcagcgccgccgtaacctccgggggcgccccccgaacggcctcggggaggtccgaccagcccgccggcagggaggcccgcagggtcgtcaggacggccggacaggcctttagccccacaaagtcagggaggggccgcaggaccccctggagtttgtgcaagaacttctcccgggcgtcgcgggccaccttcgcccgctcccgcgctccctcgagcattgcctccagggagcgcgcgcgctcccgcaaacgggcacgcgcatcgggggcgagctctgccgtcagcttggcggcatccatggcccgcgcctgccgcagcgcttcctcggccatgcgcgtggcctctggcgacagcccgccgtcgtcggggtagggcgacgcgccgggcgcaggaacaaaggccgcgtcgctgtccagctgctggcccagggccgcatctagggcgtcgaagcgccgcagctcggccagacccgagctgcggcgcgcctgctggtcgttaatgtcgcggatgctgcgcgccagctcgtccagcggcttgcgttctatcagcccttggttggcggcgtccgtcaggacggagagccaggccgccaggtcctcgggggcgtccagcgtctggccccgctgtatcagatcccgcaacaggatggccgtggggctggtcgcgatcgggggcggggcgggaatggcggcgctctgcgcgatgtcccgcgtgtgctggtcgaagacaggcagggactctagcagctggaccacgggcacgacggcggccgaagccacgtgaaaccggcggtcgttgttgtcgctggcctgcagagccttggcgctgtatacggccccccggtaaaagtactccttaaccgcgccctcgatcgcccgacgggcctgggtccgcacctcctccagccgaacctgaacggcctcggggcccagggggggtgggcgcggagccccctgcggggccgccccggccggggcgggcattacgccgaggggcccggcgtgctgtgagaccgcgtcgaccccgcgagcgagggcgtcgagggcctcgcgcatctggcgatcctccgcctccaccctaatctcttcgccacgggcaaatttggccagagcctggactctatacagaagcggttctgggtgcgtcggggtggcgggggcaaaaagggtgtccgggtgggcctgcgagcgctccagaagccactcgccgaggcgtgtatacagattggccggcggggccgcgcgaagctgcagctccaggtccgcgagttccccgtaaaaggcgtccgtctcccgaatgacatccctagccacaaggatcagcttcgccagcgccaggcgaccgatcagagagttttcgtccagcacgtgctggacgaggggcagatgggcggccacgtcggccaggctcaggcgcgtggaggccagaaagtcccccacggccgttttccggggcagcatgctcagggtaaactccagcagggcggcggccgggccggccaccccggcctgggtgtgcgtccgggccccgttctcgatgagaaaggcgaggacgcgttcaaagaaaaaaataacacagagctccagcagccccggagaagccggatacggcgaccgtaaggcgctgatggtgagccgcgaacacgcggcgacctcgcgggccagggcggcggagcacgcggtgaacttaaccgccgtggcggccacgtttgggtgggcctcgaacagctgggcaaggtctgcgcccgggggctcgggtgagcggcgagtcttcagcgcctcgagggcctgcgaggacgccggaaccgtgggcccgtcgtcctcgcccgcctcggcgaccggcggcccggccgggtcggggggtgccgaggcgaggacaggctccggaacggaggcggggaccgcggccccgacgggggttttgcctttgggggtggatttcttcttggttttggcagggggggccgagcgtttcgttttctcccccgaagtcaggtcttcgacgctggaaggcggagtccaggtgggtcggcggcgcttgggaaggccggccgagtagcgtgcccggtgccgaccaaccgggacgacgcccatctccaggacccgcatgtcgtcgtcatcttcttcggccgcctctgcggcggggggcttgggggcggagggaggcggtggtgggatcgcggagggtgggtcggcggaggggggatccgtgggtggggtacccttcagggccaccgcccatacatcgtcgggcgcccgattcgggcgcttggcctctggttttgccgacggaccggccgtcccccgggatgtctcggaggccctgtcgtcgcgacgggcccgggtcggtggcggcgactgggcggctgtgggcgggtggggccccgtgccccctaccccctcccgggggcccacgccgacgcagggctcccccaggcccgcgatctcgccccgcagggggtgcgtgatggccacgcgccgttcgctgaacgcttcgtcctgcaggtaagtctcgctggccccgtaaagatgcagagccgcggccgtcaagtccgcaggagccgcgggttccgggcccgacggcacgaaaaacaccatggctcccgcccaccgtacgtccgggcgatcgcgggtgtaatacgtcaggtatggatacatgtcccccgcccgcactttggcgatgaacgcgggggtgccctccggaaggccgtgcgggtcaaaaaggtatgcggtgtcgccgtccctgaacagccccatccctagggggccaatggttaggagcgtgtacgacagggggcgcagggcccacgggccggcgaagaacgtgtgtgcggggcattgtgtctccagcaggcccgccgcgggctccccgaagaagcccacctcgccgtatacgcgcgagaagacacagcgcagtccgccgcgcgcccctgggtactcgaggaagttggggagctcgacgatcgaacacatgcgcggcggcccagggcccgcggtcgcgcgcgtccactcgcccccctcgaccaaacaaccctcgatggcctccgcggacagaacgtcgcgagggcccacatcaaatatgaggctgagaaaggacagcgacgagcgcatgcacgataccgacccccccggctccaggtcgggcgcgaactggttccgagcaccggtgaccacgatgtcgcgatcccccccgcgttccatcgtggagtgcggtggggtgcccgcgatcatatgtgccctactggccagagacccggcctgtttatggaccggacccccggggttagtgttgtttccgccacccatgcccccgtaccatggccccggttcccctgattaggctacgagtcgcggtgatcgcttcccaaaaaccgagctgcgtttgtctgtcttgatctttcccccccccgcccgcccgcccgcccgcacaccataacaccgagaacaacacacgggggtgggcgtaacataataaagctttattggtaactagttaacggcaagtccgtgggtggcgcgacggtgtcctccgggctcatctcgtcgtcctcgacgggggtgttggaatgaggcgccccctcgcggtccgcctggcgtgggccgtgcccataggcctccggcttctgtgcgtccatgggcataggcgcggggagactgtttccggcgtcgcggacctccaggtccctgggagactccggtccggctaacggacgaaacgcggaagcgcgaaacacgccgtcggtgacccgcaggagctcgttcatcagtaaccaatccatactcagcgtaacggccagcccctggcgagacagatccacggagtccggaaccgcggtcgtctggcccagggggccgaggctgtagtccccccaggcccctaggtcgcgacggctcgtaagcacgacgcggtcggccgcggggctttgcgggggggcgtcctcgggcgcatgcgccattacctctcggatggccgcggcgcgctggtcggccgagctgaccaagggcgccacgaccacggcgcgctccgtctgcaggcccttccacgtgtcgtggagttcctggacaaactcggccacgggctcgggtcccgcggccgcgcgcgcggcttgatagcaggccgagagacgccgccagcgcgctagaaactgacccatgaagcaaaacccggggacctggtctcccgacagcagcttcgacgcccgggcgtgaatgccggacacgacggacagaaacccgtgaatttcgcgccggaccacggccagcacgttgtcctcgtgcgacacctgggccgccagctcgtcgcacacccccaggtgcgccgtggtttcggtgatgacggaacgcaggctcgcgagggacgcgaccagcgcgcgcttggcgtcgtgatacatgctgcagtactgactcaccgcgtcccccatggcctcggggggccagggccccaggcggtcgggcgtgtccccgaccaccgcatacaggcggcgcccgtcgctctcgaaccgacactcgaaaaaggcggagagcgtgcgcatgtgcagccgcagcagcacgatggcgtcctccagttggcgaatcagggggtctgcgcgctcggcgaggtcctgcagcaccccccgggcggccagggcgtacatgctaatcaacaggaggctggtgcccacctcggggggcggggggggctgcagctggaccaggggccgcagctgctcgacggcacccctggagatcacgtacagctcccggagcagctgctctatgttgtcggccatctgcatagtggggccgaggccgccccgggcggccggttcgaggagggtaatcagcgcgcccagtttggtgcgatggccctcgaccgtggggagatagcccagcccaaagtcccgggcccaggccaacacacgcagggcgaactcgaccgggcgtggaaggtaggccgcgctacacgtggccctcaacgcgtccccgaccaccagggccagaacgtaggggacgaagcccgggtcggcgaggacgttggggtgaatgccctcgagggcggggaagcggatctgggtcgccgcggccaggtggacagagggggcgtggctgggctgcccgacggggagaagcgcggacagcggcgtggccggggtggtgggggtgatgtcccagtgggtctgaccatacacgtcgatccagatgagcgccgtctcgcggagaaggctgggttgaccggaactaaagcggcgctcggccgtctcaaactcccccacgagcgcccgccgcaggctcgccagatgttccgtcggcacggccggacccatgatacgcgccagcgtctggctcagaacgccccccgacaggccgaccgcctcgcagagccgcccgtgcgtgtgctcgctggcgccctggacccgcctgaaagtttttacgtagttggcatagtacccgtattcccgcgccagaccaaacacgttcgaccccgcgagggcaatgcacccaaagagctgctggacttcgccgagtccgtggccggcgggcgtccgcgcggggacgcccgccgccagaaacccctccagggccgaaaggtagtgcgtgcagtgcgagggcgtgaacccagcgtcgatcagggtgttgatcaccacggagggcgaattggtattctggatcaacgtccacgtctgctgcagcagagccagcagccgctgctgggcgccggcggagggctgctccccgagctgcagcaggctggagacggcaggctggaagactgccagtgccgacgaactcaggaacggcacgtcgggatcaaacacggccacgtccgtccgcacgcgcgccattagcgtccccgggggcgcacaggccgagcgcgggctgacgcggctgagggccgtcgacacgcgcacctcctcgcggctgcgaaccatcttgttggcctccagtggcggaatcattatggccgggtcgatctcccgcacggtgtgctgaaactgcgccaacaggggcggcgggaccacagccccccgctcgggggtcgtcaggtactcgtccaccagggccaacgtaaagagggcccgtgtgaggggagtgagggtcgcgtcgtctatgcgctggaggtgcgccgagaacagcgtcacccgattactcaccagggccaagaaccggaggccctcttgcacgaacggggcggggaagagcaggctgtacgccggggtggtaaggttcgcgctgggctgccccaacgggaccggcgccatcttgagcgacgtctccccaagggcctcgatggaggtccgcgggctcatggccaagcagctcttggtgacggtttgccagcggtctatccactccacggcgcactggcggacgcggaccggccccagggccgccgcggtgcgcaggccggcggaatccagcgcatgggacgtgtcggagccggtgaccgcgaggatggtgtccttgatgacctccatctcccggaaggcctggtcgggggcctcggggagagccaccaccaagcggtgtacgagcaacccggggaggttctcggccaagagcgccgtctccggaagcccgtgggcccggtggagcgcgcacaggtgttccagcagcggccgccagcatgcccgcgcgtctgccggggcgatggccgttcccgacaacagaaacgccgccatggcggcgcgcagcttggccgtggccagaaacgccgggtcgtccgccccgtttgccgtctcggccgtgggggttggcggttggcgaaggccggctaggctcgccaataggcgctgcataggtccgtccgagggcggaccggcgggtgaggtcgtgacgacgggggcctcggacgggagaccgcggtctgccatgacgcccggctcgcgtgggtgggggacagcgtagaccaacgacgagaccgggcgggaatgactgtcgtgcgctgtagggagcggcgaattatcgatcccctgcggccctccaggaaccccgcaggcgttgcgagtaccccgcgtcttcgcggggtgttatacggccacttaagtcccggcatcccgttcgcggacccaggcccgggggattgtccggatgtgcgggcagcccggacggcgtgggttgcggactttctgcggggcggcccaaatggccctttaaacgtgtgtatacggacgcgccgggccagtcggccaacacaacccaccggaggcggtagccgcgtttggctgtggggtgggtggttccgccttgcgtgagtgtcctttcgacccccccctcccccgggtcttgctaggtcgcgatctgtggtcgcaatgaagaccaatccgctacccgcaaccccttccgtgtggggcgggagtaccgtggaactcccccccaccacacgcgataccgcggggcagggcctgcttcggtgcgtcctgcgccccccgatctctcgccgcgacggcccagtgctccccagggggtcgggaccccggagggcggccagcacgctgtggttgcttggcctggacggcacagacgcgccccctggggcgctgacccccaacgacgataccgaacaggccctggacaagatcctgcggggcaccatgcgcgggggggcggccctgatcggctccccgcgccatcatctaacccgccaagtgatcctgacggatctgtgccaacccaacgcggatcgtgccgggacgctgcttctggcgctgcggcaccccgccgacctgcctcacctggcccaccagcgcgccccgccaggccggcagaccgagcggctgggcgaggcctggggccagctgatggaggcgaccgccctggggtcggggcgagccgagagcgggtgcacgcgcgcgggcctcgtgtcgtttaacttcctggtggcggcgtgtgccgcctcgtacgacgcgcgcgacgccgccgatgcggtacgggcccacgtcacggccaactaccgcgggacgcgggtgggggcgcgcctggatcgtttttccgagtgtctgcgcgccatggttcacacgcacgtcttcccccacgaggtcatgcggtttttcggggggctggtgtcgtgggtcacccaggacgagctagcgagcgtcaccgccgtgtgcgccgggccccaggaggcggcgcacaccggccacccgggccggccccgctcggccgtgatcctcccggcgtgtgcgttcgtggacctggacgccgagctggggctggggggcccgggcgcggcgtttctgtacctggtattcacttaccgccagcgccgggaccaggagctgtgttgtgtgtacgtgatcaagagccagctccccccgcgcgggttggagccggccctggagcggctgtttgggcgcctccggatcaccaacacgattcacggcaccgaggacatgacgcccccggccccaaaccgaaaccccgacttccccctcgcgggcctggccgccaatccccaaaccccgcgttgctcggctggccaggtcacgaacccccagttcgccgacaggctgtaccgctggcagccggaccttcgggggcgccccaccgcacgcacctgtacgtacgccgcctttgcagagctcggcatgatgcccgaggatagtccccgctgcctgcaccgcaccgagcgctttggggcggtcagcgtccccgttgttattctggaaggcgtggtgtggcgccccggcgagtggcgggcatgcgcgtgagcgtagcaaacgccccgcccacacaacgctccgcccccaaccccttccccgctgtcactcgtggttcgttgacccggacgtccgccaaataaagccactgaaacccgaaacgcgagtgttgtaacgtcctttgggcgggaggaagccacaaaatgcaaatgggatacatggaaggaacacacccccgtgactcaggacatcggcgtgtccttttgggtttcactgaaactggcccgcgccccacccctgcgcgatgtggataaaaagccagcgcgggtggtttagggtaccacaggtgggtgctttggaaacttgtcggtcgccgtgctcctgtgagcttgcgtccctccccggtttcctttgcgctcccgccttccggacctgctctcgcctatcttctttggctgtcggtgcgattcgtcaggcagcggccttgtcgaatctcgaccccaccactcgccggacccgccgacgtcccctctggagcccgccgaaacccgccgcgtctgttgaaatggccagccgcccagccgcatcctctcccgtcgaagcgcgggccccggttgggggacaggaggccggcggccccagcgcagccacccagggggaggccgccggggcccctctcgcccacggccaccacgtgtactgccagcgagtcaatggcgtgatggtgctttccgacaagacgcccgggtccgcgtcctaccgcatcagcgatagcaactttgtccaatgtggttccaactgcaccatgattatcgacggagacgtggtgcgcgggcgcccccaggacccgggggccgcggcatcccccgctcccttcgttgcggtgacaaacatcggagccggcagcgacggcgggaccgccgtcgttgcattcgggggaaccccacgtcgctcggcggggacgtctaccggtacccagacggccgacgtcccagccgaggcccttgggggcccccctcctcctccccgcttcaccctgggtggcggctgttgctcctgtcgcgacacacggcgccgctctgcggtattcgggggggagggggatcccgtcggccccgcggagttcgtctcggacgaccggtcgtccgattccgactcggatgactcggaggacaccgactcggagacgctgtcacacgcctcctcggacgtgtccggcggggccacgtacgacgacgcccttgactccgattcgtcatcggatgactccctgcagatagatggccccgtgtgtcgcccgtggagcaatgacaccgcgcccctggatgtttgccccgggacccccggcccgggcgccgacgccggtggtccctcagcggtagacccacacgcgccgacgacaggggccggcgctggtcttgcggccgatcccgccgtggcccgggacgacgcggaggggctttcggacccccggccacgtctgggaacgggcacggcctaccccgtccccctggaactcacgcccgagaacgcggaggccgtggcgcgctttctgggagatgccgtgaaccgcgaacccgcgctcatgctggagtacttttgccggtgcgcccgcgaggaaaccaagcgtgtcccccccaggacattctgcagcccccctcgcctcacggaggacgactttgggcttctcaactacgcgctcgtggagatgcagcgcctgtgtctggacgttcctccggtcccgccgaacgcatacatgccctattatctcagggagtatgtgacgcggctggtcaacgggttcaagccgctggtgagccggtccgctcgcctttaccgcatcctgggggttctggtgcacctgcggatccggacccgggaggcctcctttgaggagtggctgcgatccaaggaagtggccctggactttggcctgacggaaaggcttcgcgagcacgaagcccagctggtgatcctggcccaggctctggaccattacgactgtctgatccacagcacaccgcacacgctggtcgagcgggggctgcaatcggccctgaagtatgaggagttttacctaaagcgctttggcgggcactacatggagtccgtcttccagatgtacacccgcatcgccggctttttggcctgccgggccacgcgcggcatgcgccacatcgccctggggcgagaggggtcgtggtgggaaatgttcaagttctttttccaccgcctctacgaccaccagatcgtaccgtcgacccccgccatgctgaacctggggacccgcaactactacacctccagctgctacctggtaaacccccaggccaccacaaacaaggcgaccctgcgggccatcaccagcaacgtcagtgccatcctcgcccgcaacgggggcatcgggctatgcgtgcaggcgtttaacgactccggccccgggaccgccagcgtcatgcccgccctcaaggtcctcgactcgctggtggcggcgcacaacaaagagagcgcgcgtccgaccggcgcgtgcgtgtacctggagccgtggcacaccgacgtgcgggccgtgctccggatgaagggggtcctcgccggcgaagaggcccagcgctgcgacaatatcttcagcgccctctggatgccagacctgtttttcaagcgcctgattcgccacctggacggcgagaagaacgtcacatggaccctgttcgaccgggacaccagcatgtcgctcgccgactttcacggggaggagttcgagaagctctaccagcacctcgaggtcatggggttcggcgagcagatacccatccaggagctggcctatggcattgtgcgcagtgcggccacgaccgggagccccttcgtcatgttcaaagacgcggtgaaccgccactacatctacgacacccagggggcggccatcgccggctccaacctctgcaccgagatcgtccatccggcctccaagcgatccagtggggtctgcaatctgggaagcgtgaatctggcccgatgcgtctccaggcagacgtttgactttgggcggctccgcgacgccgtgcaggcgtgcgtgctgatggtgaacatcatgatcgacagcacgctacaacccacgccccagtgcacccgcggcaacgacaacctgcggtccatgggaatcggcatgcagggcctgcacacggcctgcctgaagctggggctggatctggagtctgccgaatttcaggacctgaacaaacacatcgccgaggtgatgctgctgtcggcgatgaagaccagcaacgcgctgtgcgttcgcggggcccgtcccttcaaccactttaagcgcagcatgtatcgcgccggccgctttcactgggagcgctttccggacgcccggccgcggtacgagggcgagtgggagatgctacgccagagcatgatgaaacacggcctgcgcaacagccagtttgtcgcgctgatgcccaccgccgcctcggcgcagatctcggacgtcagcgagggctttgcccccctgttcaccaacctgtttagcaaggtgacccgggacggcgagacgctgcgccccaacacgctcctgctaaaggaactggaacgcacgtttagcgggaagcgcctcctggaggtgatggacagtctcgacgccaagcagtggtccgtggcgcaggcgctcccgtgcctggagcccacccaccccctccggcgattcaagaccgcgtttgactacgaccagaagttgctgatcgacctgtgtgcggaccgcgccccctacgtcgaccatagccaatccatgaccctgtatgtcacggagaaggcggacgggaccctcccagcctccaccctggtccgccttctggtccacgcatataagcgcggactaaaaacagggatgtactactgcaaggttcgcaaggcgaccaacagcggggtctttggcggcgacgacaacattgtctgcacgagctgcgcgctgtgaccgacaaaccccctccgcgccaggcccgccgccactgtcgtcgccgtcccacgcgctcccccgctgccatggattccgcggccccagccctctcccccgctctgacggcccatacgggccagagcgcgccggcggacctggcgatccagattccaaagtgccccgaccccgagaggtacttctacacctcccagtgtcccgacattaaccacctgcgctccctcagcatccttaaccgctggctggaaaccgagcttgttttcgtgggggacgaggaggacgtctccaagctttccgagggcgagctcagcttttaccgcttcctcttcgctttcctgtcggccgccgacgacctggttacggaaaacctgggcggcctctccggcctgtttgagcagaaggacattctccactactacgtggagcaggaatgcatcgaagtcgtacactcgcgcgtgtacaacatcatccagctggtgctttttcacaacaacgaccaggcgcgccgcgagtacgtggccggcaccatcaaccacccggccatccgcgccaaggtggactggttggaagcgcgggtgcgggaatgcgcctccgttccggaaaagttcattctcatgatcctcatcgagggcatcttttttgccgcctcgtttgccgccatcgcctaccttcgcaccaacaaccttctgcgggtcacctgccagtcaaacgacctcatcagccgggacgaggccgtgcacacgacggcctcgtgttacatctacaacaactacctcggcgggcacgccaagcccccgcccgaccgcgtgtacgggctgttccgccaggcggtcgagatcgagatcggatttatccgatcccaggcgccgacggacagccatatcctgagcccggcggcgctggcggccatcgaaaactacgtgcgattcagcgcggatcgcctgttgggccttatccacatgaagccactgttttccgccccaccccccgacgccagctttccgctgagcctcatgtccaccgacaaacacaccaattttttcgagtgtcgcagcacctcctacgccggggcggtcgtcaacgatctgtgagggtcgcggcgcgcttctacccgtgtttgcccataataaacctctgaaccaaactttgggtctcattgtgattcttgtcagggacgcgggggtgggagaggataaaaggcggcgcaaaaagcagtaaccaggtccggccagattctgagggcataggataccataattttattggtgggtcgtttgttcggggacaagcgcgctcgtctgacgtttgggctactcgtcccagaatttggccaggacgtccttgtagaacgcgggtgggggggcctgggtccgcagctgctccagaaacctgtcggcgatatcaggggccgtgatatgccgggtcacgatagatcgcgccaggttttcgtcgcggatgtcctggtagataggcaggcgtttcagaagagtccacggcccccgctccttggggccgataagcgatatgacgtacttaatgtagcggtgttccaccagctcggtgatggtcatgggatcggggagccagtccagggactctggggcgtcgtggatgacgtggcgtcgccggctggccacataactgcggtgctcttccagcagctgcgcgttcgggacctggacgagctcgggcggggtgagtatctccgaggaggacgacctggggccggggtggcccccggtaacgtcccggggatccagggggaggtcctcgtcgtcttcgtatccgccggcgatctgttgggttagaatttcggtccacgagacgcgcgtctcggtgccgccggtggccggcggcagagggggcctggtttccgtggagcgcgagctggtgtgttcccggcggatggcccgccgggtctgagagcgactcgggggggtccagtgacattcgcgcagcacatcctccacggaggcgtaggtgttattgggatggaggtcggtgtggcagcggacaaagagggccaggaactgggggtagctcatcttaaagtacttcagtatatcgcgacagttgatcgtgggaatgtagcaggcgctaatatccaacacaatatcgcagcccatcaacaggaggtcagtgtccgtggtgtacacgtacgcgaccgtgttggtgtgatagaggttggcgcaggcatcgtccgcctccagctgacccgagttaatgtaggcgtaccccagggcccggagaacgcgaatacagaacagatgcgccagacgcagggccggcttcgagggcgcggcggacggcagcgcggctccggacccggccgtcccccgggtccccgaggccagagaggtgccgcgtcggcgcatgttggaaaaggcagagctgggtctggagtcggtgatgggggaaggcggtggagaggcgtccacgtcactggcctcctcgtccgtccggcactgggccgtcgtgcgggccaggatggccttggctccaaacacaaccggctccatacaattgaccccgcgatcggtaacgaagatggggaaaagggacttttgggtaaacacctttaataagcgacagaggcagtgtagcgtaatggcctcgcggtcgtaactggggtatcggcgctgatatttgaccaccaacgtgtacatgacgttccacaggtccacggcaatgggggtgaagtacccggccggggccccaaggccccggcgcttgaccagatggtgtgtgtgggcaaacttcatcatcccgaacaaacccatgtcaggtcgattgtaactgcggatcggcctaactaaggcgtggttggtgcgacggtccgggacacccgagcctgtctctctgtgtatggtgacccagacaacaacaccgacacaagaggacaataatccgttaggggacgctctttataatttcgatggcccaactccacgcggattggtgcagcaccctgcatgcgccggtgcgggccaaccttccccccgctcattgcctcttccaaaagggtgtggcctaacgagctgggggcgtatttaatcaggctagcgcggcgggcctgccgtagtttctggctcggtgagcgacggtccggttgcttgggtcccctggctgccatcaaaaccccaccctcgcagcggcatacgccccctccgcgtcccgcacccgagaccccggcccggctgccctcaccaccgaagcccacctcgtcactgtggggtgttcccagcccgcgttgggatgacggattcccctggcggtgtggcccccgcctcccacgtggaggacgcgtcggacgcgtccctcgggcagccggaggagggggcgccctgccaggtggtcctgcagggcgccgagcttaatggaatcctacaggcgtttgccccgctgcgcacgagccttctggactcgcttctggttatgggagaccggggcatccttatccataacacgatctttggggagcaggtgttcctgcccctggaacactcgcaattcagtcggtatcgctggcgcggacccacggcggcgttcctgtctctcgtggaccagaagcgctccctcctgagcgtgtttcgcgccaaccagtacccggacctacgtcgggtggagttggcgatcacgggccaggccccgtttcgcacgctggttcagcgcatatggacgacgacgtccgacggcgaggccgttgagctagccagcgagacgctgatgaagcgcgaactgacgagctttgtggtgctggttccccagggaacccccgacgttcagttgcgcctgacgaggccgcagctcaccaaggtccttaacgcgaccggggccgatagtgccacgcccaccacgttcgagctcggggttaacggcaaattttccgtgttcaccacgagtacctgcgtcacatttgctgcccgcgaggagggcgtgtcgtccagcaccagcacccaggtccagatcctgtccaacgcgctcaccaaggcgggccaggcggccgccaacgccaagacggtgtacggggaaaatacccatcgtaccttctctgtggtcgtcgacgattgcagcatgcgggcggtgctccggcgactgcaggtcgccgggggcaccctcaagttcttcctcacgacccccgtccccagtctgtgcgtcaccgccaccggtcccaacgcggtatcggcggtatttctcctgaaaccccagaagatttgcctggactggctgggtcatagccaggggtctccttccgccgggagctcggcctcccgggcctctgggagcgagccaacagacagccaggactccgcgtcggacgcggtcagccacggcgatccggaagacctcgatggcgctgcccgggcgggagaggcgggggcctcgtacgcctgtccgatgccgtcgtcgaccacgcgggtcactcccacgaccaagcgggggcgctcggggggcgaggatgcgcacgcggacacggccctaaagaaacctaagacggggtcgcccaccgcacccccgcccgcagatccagtccccctggacacggaggacgactccgatgcggcggacgggacggcggcccgtcccgccgctccagacgcccgaagcggaagccgttacgcgtgttactttcgcgacctcccgaccggagaagcaagccccggcgccttctccgccttccgggggggcccccaaaccccgtctggttttggattcccctgacggggcggggccttagcggccgcccaaccctcgcaacatcccggggttaatgtaaataaacttggtattgcccaacactctcccgcgtgtcgcgtgtggttcatgtgtgtgcctggcgcccccaccctcgggttcgtgtatttcctttccctgtccttataaaagccgtatgtggggcgctgacggaaccaccccgcgtgccatcacggccaaggcgcgggatgctccgcaacgacagccaccgggccgcgtccccggaggacggccagggacgggtcgacgacggacggccacacctcgcgtgcgtgggggccctggcgcgggggttcatgcatatctggcttcaggccgccacgctgggttttgcgggatcggtcgttatgtcgcgcgggccgtacgcgaatgccgcgtctggggcgttcgccgtcgggtgcgccgtgctgggctttatgcgcgcgccccctcccctcgcgcggcccaccgcgcggatatacgcctggctcaaactggcggccggtggagcggcccttgttctgtggagtctcggggagcccggcacgcagccgggggccctggccccgggcccggccacccagtgcctggcgctgggcgccgcctatgcggcgctcctggtgctcgccgatgacgtctatccgctctttctcctcgccccggggcccctgttcgtcggcaccctggggatggtcgtcggcgggctgacgatcggaggcagcgcgcgctactggtggatcggtgggcccgccgcggccgccctggccgcggcggtgttggcgggcccgggggcgaccaccgccagggactgcttctccagggcgtgccccgaccaccgccgcgtctgcgtcatcgtcgcaggcgagtctgtttcccgccgccccccggaggacccagagcgacccggggacccagggccaccgtcccccccgacaccccaacgatcccaggggccgccggccgatgaggtcgcaccggccggggtagcgcggcccgaaaacgtctgggtgcccgtggtcacctttctgggggctggcgcgctcgccgtcaagacggtgcgagaacatgcccggggaacgccgggcccgggcctgccgctgtggccccaggtgtttctcggaggccatgtggcggtggccctgacggagctgtgtcaggcgcttgcgccctgggaccttacggacccgctgctgtttgttcacgccggactgcaggtcatcaacctcgggttggtgtttcggttttccgaggttgtcgtgtatgcggcgctagggggtgccgtgtggatttcgttggcgcaggtgctggggctccggcgtcgcctgcacaggaaggaccccggggacggggcccggttggcggcgacgcttcggggcctcttcttctccgtgtacgcgctggggtttggggtgggggcgctgctgtgccctccggggtcaacgggcgggcggtcgggcgattgatatatttttcaataaaaggcattagtcccgaagaccgccggtgtgtgatgatttcgccataacacccaaaccccggatggggcccgggtataaattccggaaggggacacgggctaccttcactaccgagggcgcttggtcgggaggccgcatcgaacgcacacccccatccggtggtccgtgtggaggtcgtttttcagtgcccggtctcgctttgccgggaacgctagccgatccctcgcgagggggaggcgtcgggcatggccccggggcgggtgggccttgccgtggtcctgtggagcctggtgtggctcggggcgggggtgtccgggggctcggaaactgcctccaccgggcccacgatcaccgcgggagcggtgacgaacgcgagcgaggcccccacatcggggtcccccgggtcagccgccagcccggaggtcacccccacatcgaccccaaaccccaacaatgtcacacaaaaccaaaccacccccaccgagccggccagccccccaacaacccccaagcccacctccacacccaaaagcccccccacgtccacccccgaccccaaacccaagaacaacaccacccccgccaagtcggaccgccccactaaaccccccgggcccgtgtggtgcgaccgccgcgatttattggcccggtacggctcgcgggtgcagatccgatgccggtttcggaattccacccgcatggagttccgcctccagatatggcgttactccatgggtccgtcccccccaatcgctccggctcccgacctagaggaggtcctgacgaacatcaccgccccacccgggggactcctggtgtacgacagcgcccccaacctaacggacccccacgtgctctgggcggagggggccggcccgggcgccgaccctccgttgtattctgtcaccgggccgctgccgacccagcggctgattatcggcgaggtgacgcccgcgacccagggaatgtattacttggcctggggccggatggacagcccgcacgagtacgggacgtgggtgcgcgtccgcatgttccgccccccgtctctgaccctccagccccacgcggtgatggagggtcagccgttcaaggcgacgtgcacggccgccgcctactacccgcgtaaccccgtggagtttgtctggttcgaggacgaccaccaggtgtttaacccgggccagatcgacacgcagacgcacgagcaccccgacgggttcaccacagtctctaccgtgacctccgaggctgtcggcggccaggtccccccgcggaccttcacctgccagatgacgtggcaccgcgactccgtgacgttctcgcgacgcaatgccaccgggctggccctggtgctgccgcggccaaccatcaccatggaatttggggtccggcatgtggtctgcacggccggctgcgtccccgagggcgtgacgtttgcctggttcctgggggacgacccctcaccggcggctaagtcggccgttacggcccaggagtcgtgcgaccgccccgggctggctacggtccggtccaccctgcccatttcgtacgactacagcgagtacatctgtcggttgaccggatatccggccgggattcccgttctagagcaccacggcagtcaccagcccccacccagggaccccaccgagcggcaggtgatcgaggcgatcgagtgggtggggattggaatcggggttctcgcggcgggggtcctggtcgtaacggcaatcgtgtacgtcgtccgcacatcacagtcgcggcagcgtcatcggcggtaacgcgagacccccccgttacctttttaatatctatatagtttggtccccctctatcccgcccaccgctgggcgctataaagccgccaccctctcttccctcaggtcatccttggtcgatcccgaacgacacacggcgtggagcaaaacgcctccccctgagccgctttcctaccagcgcaacggcatgcctctgcgggcatcggaacacgcctaccggcccctgggccccgggacaccccccatgcgggctcggctccccgccgcggcctgggttggcgtcgggaccatcatcgggggagttgtgatcattgccgcgttggtcctcgtgccctcgcgggcctcgtgggcactttccccatgcgacagcggatggcacgagttcaacctcgggtgcatatcctgggatccgacccccatggagcacgagcaggcggtcggcggctgtagcgccccggcgaccctgatcccccgcgcggctgccaaacagctggccgccgtcgcacgcgtccagtcggcaagatcctcgggctactggtgggtgagcggagacggcattcgggcctgcctgcggctcgtcgacggcgtcggcggtattgaccagttttgcgaggagcccgcccttcgcatatgctactatccccgcagtcccgggggctttgttcagtttgtaacttcgacccgcaacgcgctggggctgccgtgaggcgcgtgtactgcggtctgtctcgtctcctcttctccccttccctccccctccgcatcccaggatcacaccggccaacgagggttggggggtccggcacggacccaaaataataaacacacaatcacgtgcgataaaaagaacacgcggtcccctgtggtgtttttggttatttttattaaatctcgtcgtcaaacagggggaaaggggcgtggtctagcgacggcagcacgggtggaggcgttcaccggctccggcgtccttcgcgtttaagcttggtcaggagggcgctcagggcggcgacgttggtcgggccgtcgttggtcagggcgttggctcgatggcgggcgaggacgggcgaggggctcaacggcgggggcgggggcccggtgcggcccgggggggaaaatagggcggatcccccccagtcgtacaggggattttccgcctcaatgtacggggaggccggcgctgcattcgccgtgttcgcgcagacgttttcgtagacccgcatccatggtatttcctcgtagacacgccccccgtcctcgctcacagtctcgtatattgactcgtcgtcctcgtagggggcgtgccgttcgcgggccgaggcggcgtgggtggctttgcggcgggcgtcgtcgtcgtcgtcggccgtcagatacgtggcttccatctggtcgggttctccctccggggcgggtccccacccccgtggccgatcgaggctccccagagacgcgcgccggacgaggagggggcacgtcgccgccggcggtcgcctgtcgggtcccgcgacgttacgggccgggaggcgcgggggcacctcccccatgtgcgtgtaatacgtggccggctgtgcggccgcagcggggggctcggcgaccgggtcgtccgcatccggaagcgggggcgccgcgccgtccgcgcggcgcctccggaaccgccgggtggccgcgggggtcgagtgtaggcgaggtcgggggaggggcgggggctcgttgtcgcgccgcgcccgctgaatcttttcccgacaggtcccaccccccgcgcgatgcccccccgggccgcgggccatgtcgtccgggggaggccccgcggaccacgtcgtccggcgagacgccacgagccgcaggatggactcgtagtggagcgacggcgccccgctgcggagcagatccgcggccagggcggccccgaaccaagccttgatgctcaactccatccgggcccagctgggggcggtcatcgtggggaacaggggggcggtggtccgacagaaacgctcctggctgtccaccgcggcccgcagatactcgttgttcaggctgtcggtggcccagacgccgtacccggtgagggtcgcgttgatgatatactgggcgtggtgatggacgatcgacagaacctccaccgtggatacgacggtatccacggtcccgtacgtaccgccgctccgcttgccggtctgccacaggttggctaggcgcgtcaggtggcccaggacgtcgctgaccgccgccctgagcgccatgcactgcatggagccggtcgtgccgctgggaccccggtccagatggcgcgcgaacgtttccgcgggcgcctccgggctgccgccgagcgggaggaaccggcgattggagggactcagccggtggcatacgtgcttgtctgtcgtccacagcatccaggacgcccaccggtacagcacggagacgtaggccaggagctcgttgagccgcagtgcggtgtcggtgctggggcggcttgggtccgccgggcgcataaagaacatgtactgctgaatccgatggagggcgtcgcgcaggccggccacggtggcggcgtacttggccgccgcggccccgctcttgaacggggtgcgcgccagcagctttggcgccagggtgggccgcagcagcacgtgaaggctggggtcgcagtcgcccacggggtcctcggggacgtccaggccgctgggcaccaccgtctgcaggtacttccagtactgcgtgaggatggcgcggctcaactggccgccggtgagctccacctcgcccagcgcctgggtggcggccgaagcgtagtgccggatgtactcgtagtgcgggtcgctggcgagcccgtccacgatcaaactctcgggaaccgtgttgtgttgccgcgcggccaaccggacgctgcgatcggtgcaggtcagaaacgccggctgcgcgtcgtcggagcgctgccgcaaggcgcccacggccgcgctaaggagcccctccggggtggggagcagacacccgccgaagatgcgccgctcgggaacgcccgcgttgtcgccgcggatcaggttggcaggcgtcaggcaccgcgccagccgcagggagctcgcgccgcgcgtccggcgctgcatggtgacgcccgttcggtcgggacccgccggtcggagttatgccgcgtccagggccatcggggcgctttttatcgggaggagcttatgggcgtggcgggcctcccagcccggtcgcgcgcctccccgacacgtgcgcccgcagggcggcggccccctcgtctcccatcagcagtttcctaaactgggacatgatgtccaccacgcggacccgcgggcccaacacggacccgccgcttacgggggcgggggggaagggctccaggtccttgagaagaaaggcggggtctgccgtcccggacacgggggcccggggcgctgaggaggcggggcgcagatccacgtgctccgcggccgcgcggacgtccgcccagaacttggcgggggtggtgcgcgcgtacaggggctgggtcgctcggaggacgcacgcgtagcgcaggggggtgtacgtgcccacctcgggggccgtgaatcccccgtcaaacgcggccagtgtcacgcacgccaccacggtgtcggcaaagcccagcagccgctgcaggacgagcccggcggccagaatggcgcgcgtggccgccgcgtcgtcccggcgccggtgcgcgtccccgcacgcccgggcgtactttaaggtcacggtcgccagggccgtgtgcagcgcgtacaccgcagcgcccagcacggcgttgagcccgctgttggcgagcagccggcgcgctgcggtgtcgcccagcgcctcgtgctcggcccccacgaccgcggggcttcccaggggcagggcgcgaaacagctcctcccgcgccacgtccgcaaaggcggggtggtgcacgtgcgggtgcaggcgcgcccccacgaccaccgagagccactggaccgtctgctccgccatcaccgccagcacatccagcacgcgccccaggaaggcggcctcccgcgtcaaaacgcaccggacggcgtcgggattgaagcgggcgagcagggccccggtggccaggtacgtcatgcggccggcatagcgggcggccacgcgacagtcgcggtccagcagcgcgcgcaccccgggccagtacagcagggaccccagcgagctgcgaaacaccgcggcgtcggggccggattggggggacactaacccccccgcgctcagtaacggcacggccgcggccccgacgggacgcaacgccgtgaggctcgcgaactgccgcctcagctcggcagccctgtcgtccaggtccgacccgcgcgcctctgcgtgaaggcgcgtcccgcacacccacccgttgatggccagccgcacgacggcatccgccaaaaagctcatcgcctgggcggggctggtttttgttcgacgatccgtcaggtcaagaatcccatcgcccgtgatataccaggccaacgcctcgccctgctgcagggtttggcggaaaaacaccgcggggttgtcgggggaggcgaagtgcatgacccccacgcgcgataacccgaacgcgctatccggacacgggtaaaacccggccggatgccccagggctagggcggagcgcacggactcgtcccacacggcaacctgaggggccagtcgatccaacgggaatgccgcccggagctccgggcccggcacgcgtccctccagaacctccaccttgggcggggaacgggccccgccgccgtcctccggcccgacgtcttccgggtagtcgtcctcctcgtactgcagctcctctaggaacagcggcgacggcgccacccgcgaaccgccgacccgccccaaaatagcccgcgcgtcgacgggacccaggtatcccccctgccgggcctgcggaggaccgcggggaacctcatcatcatcgtccaggcgaccgcgcaccgactggctacgggccgcatcgggcccggggcgctgccgggacgctcggcgatgggatgtgggcggggcttccgacgcgcgccgtcgtcgggctcgcgggccttcccgtcgacggcgcacgggcggctcgtcgcccgccatctcctccagagcctctagctcgctgtcgtcatccccgcggaacaccgcacgcaggtaccccatgaaccccaccccatcgcccgctggctcgtccgccacgggcgaggcgcgggggcgggtggatgcgcgcctcctacgccccgcgggttcgcgagccgacatggtggcgatagacgcgggttatcggatgtccgctaccccccaaaaaagaaaaagaccccacagcgcggatggaggccggggtaggtgccgccggaccccctcgcgatgggaatggacgggagcgacggggccggcgcaaaaaacgcagtatctcccgcgaaggctacccgccgccccagcccccggccaaatgcggaaacggtcccgcgctctcgcctttatacgcgggccgccctgcgacacaatcacccgtccgtggtttcgaatctacacgacaggcccgcagacgcggctaacacacacgccggcaacccagaccccagtgggttggttgcgcggtcccgtctcctggctagttcttttccccaccaccaaataatcagacgacaaccgcaggtttttgtaatgtatgtgctcgtgtttattgtggatacgaaccggggacgggaggggaaaacccagacgggggatgcgggtccggtcgcgccccctacccaccgtactcgtcaattccaagggcatcggtaaacatctgctcaaactcgaagtcggccatatccagagcgccgtagggggcggagtcgtggggggtaaatcccggacccggggaatccccgtcccccaacatgtccagatcgaaatcgtctagcgcgtcggcatgcgccatcgccacgtcctcgccgtctaagtggagctcgtcccccaggctgacatcggtcgggggggccgtcgacagtctgcgcgtgtgtcccgcggggagaaaggacaggcgcggagccgccagccccgcctcttcgggggcgtcgtcgtccgggagatcgagcaggccctcgatggtagacccgtaattgtttttcgtacgcgcgcggctgtacgcgtgttcccgcatgaccgcctcggagggcgaggtcgtgaagctggaatacgagtccaacttcgcccgaatcaacaccataaagtacccagaggcgcgggcctggttgccatgcagggtgggaggggtcgtcaacggcgcccctggctcctccgtagccgcgctgcgcaccagcgggaggttaaggtgctcgcgaatgtggtttagctcccgcagccggcgggcctcgattggcactccccggacggtgagcgctccgttgacgaacatgaagggctggaacagacccgccaactgacgccagctctccaggtcgcaacagaggcagtcaaacaggtcgggccgcatcatctgctcggcgtacgcggcccataggatctcgcgggtcaaaaatagatacaaatgcaaaaacagaacacgcgccagacgagcggtctctcggtagtacctgtccgtgatcgtggcgcgcagcatttctcccaggtcgcgatcgcgtccgcgcatgtgcgcctggcggtgcagctgccggacgctggcgcgcaggtaccggtacagggccgagcagaagttggccaacacggttcgatagctctcctcccgcgcccgtagctcggcgtggaagaaacgagagagcgcttcgtagtagagcccgaggccgtcgcgggtggccggaagcgtcgggaaggccacgtcgccgtgggcgcgaatgtcgatttgggcgcgttcggggacgtacgcgtccccccattccaccacatcgctgggcagcgttgataggaatttacactcccggtacaggtcggcgttggtcggtaacgccgaaaacaaatcctcgttccaggtatcgagcatggtacatagcgcggggcccgcgctaaagcccaagtcgtcgaggagacggttaaagagggcggcgggggggacgggcatgggcggggagggcatgagctgggcctggctcaggcgccccgttgcgtacagcggaggggccgccggggtgtttttgggacccccggccgggcgggggggtggtggcgaagcgccgtccgcgtccatgtcggcaaacagctcgtcgaccaagaggtccattgggtggggttgatacgggaaagacgatatcgggcttttgatgcgatcgtccccgcccgcccagagagtgtgggacgcccgacggcgcgggaagagaaaaacccccaaacgcgttagaggaccggacggaccttatggggggaagtgggcagcgggaaccccgtccgttcccgaggaatgacagcccgtggtcgccaccccgcatttaagcaacccgcacgggccgccccgtacctcgtgacttccccccacattggctcctgtcacgtgaaggcgaaccgagggcggctgtccaacccaccccccgccacccagtcacggtccccgtcggattgggaaacaaaggcacgcaacgccaacaccgaatgaacccctgttggtgctttattgtctgggtacggaagtttttcactcgacgggccgtctggggcgagaagcggagcgggctggggctcgaggtcgctcggtggggcgcgacgccgcagaacgccctcgagtcgccgtggccgcgtcgacgtcctgcaccacgtctggattcaccaactcgttggcgcgctgaagcaggtttttgccctcgcagaccgtcacgcggatggtggtgatgccaaggagttcgttgaggtcttcgtctgtgcgcggacgcgacatgtcccagagctggaccgccgccatccgggcatgcatggccgccaggcgcccgaccgcggcgcagaagacgcgcttgttaaagccggccacccggggggtccatggcgcgtcggggtttgggggggcggtgctaaagtgcagctttctggccagcccctgcgcgggtgtcttggatcgggttggcgccgtcgacgcgggggcgtctgggagtgcggcggattctggctgggccgatttcctgccgcgggtggtctccgccgccggggccgcgggggccttagtcgccacccgctgggttcggggggcccggggggcggtggtgggtgtgcgtccggcccctccggacccagcgggcggcggaggcgcccgcgcaggccccgggccggacaaaaccgccccggaaacgggacgccgcgtccgggggacctccgggtgttcgtcgtcttcggatgacgagcccccgtagagggcataatccgactcgtcgtactggacgaaacggacctcgcccctcgggcgcgcgcgtgtctgtagggcgccacggcgggaggtggcaggcggactatcgggactcgccatacatgaagacggggtgtagtacagatcctcgtactcatcgcgcggaacctcccgcggacccgacttcacggagcggcgagaggtcatggttccacgaacacgctagggtcggatgcgcggacaattaggcctgggttcggacggcggggggtggtgcaggtgtggagaggtcgagcgataggggcggcccgggagagaagagagggtccgcaaaacccactggggatgcgtgagtggccctctgtgggcggtgggggagagtcttataggaagtgcatataaccacaacccatgggtctaaccaatccccaggggccaagaaacagacacgccccaaacggtctcggtttccgcgaagaaggggaagtcctgggacaccctccacccccacccctcaccccacacagggcgggttcaggcgtgcccggcagccagtagcctctggcagatctgacagacgtgtgcgataatacacacgcccatcgaggccatgcctacataaaagggcaccagggcccccggggcagacatttggccagcgttttgggtctcgcaccgcgcgcccccgatcccatcgcgcccgccctcctcgccgggcggctccccgtgcgggcccgcgtctcccgccgctaaggcgacgagcaagacaaacaacaggcccgcccgacagacccttctgggggggcccatcgtccctaacaggaagatgagtcagtggggatccggggcgatccttgtccagccggacagcttgggtcgggggtacgatggcgactggcacacggccgtcgctactcgcgggggcggagtcgtgcaactgaacctggtcaacaggcgcgcggtggcttttatgccgaaggtcagcggggactccggatgggccgtcgggcgcgtctctctggacctgcgaatggctatgccggctgacttttgtgcgattattcacgcccccgcgctatccagcccagggcaccacgtaatactgggtcttatcgactcggggtaccgcggaaccgttatggccgtggtcgtagcgcctaaaaggacgcgggaatttgcccccgggaccctgcgggtcgacgtgacgttcctggacatcctggcgccccccccggccctcaccaagccgatttccctgcggcagttcccgcaactggcgcccccccctccaaccggggccgggatacgcgcagatccttggttggagggggcgctcggggacccaagcgtgactccggccctaccggcgcgacgccgagggcggtccctcgtctatgccggcgagctgacgccggttcagacggaacacggggacggcgtacgagaagccatcgccttccttccaaaacgcgaggaggatgccggtttcgacattgtcgtccgtcgcccggtcaccgtcccggcaaacggcaccacggtcgtgcagccatccctccgcatgctccacgcggacgccgggcccgcggcctgttatgtgttggggcggtcgtcgctcaacgcccgcggcctcctggtcgttcctacgcgctggctccccgggcacgtatgtgcgtttgttgtttacaaccttacgggggttcctgtgaccctcgaggccggcgccaaggtcgcccagctcctggttgcgggggcggacgctcttccttggatccccccggacaactttcacgggaccaaagcgcttcgaaactaccccaggggtgttccggactcaaccgccgaacccaggaacccgccgctcttggtgtttacgaacgagtttgacgcggaggcccccccgagcgagcgcgggaccgggggttttggctctaccggtatttagcccatagcttggggttcgttccgggcaataaaaaacgtttgtatctcatctttcctgtgtgtagttgtttctgttggaggcctgtgggtctatcacacccgcccctccatcccacaaacacagaacacacgggttggatgaaaacacgcatttattgacccaaaacacacggagctgctcgagatgggccagggcgaggtgcggttggggaggctgtaggtctgggaacggacacgcggggacacgattccggtttggggtccgggagggcgtcgccgtttcgggcggcaggcgccagcgtaacctccgggggcggcgtgtgggggtgccccaaggagggcgcctcggtcaccccaagcccccccaagcgggttcccccggcaaccccgaaggcggagaggccaagggcccgttcggcgatggccacatcctccatgaccacgtcgctctcggccatgctccgaatagcctgggagacgagcacatccgcggacttgtcagccgcccccacggacatgtacatctgcaggatggtggccatacacgtgtccgccaggcgccgcatcttgtcctgatgggccgccacggccccgtcgatcgtgggggcctcgagcccggggtggtggcgcgccagtcgttctaggttcaccatgcaggcgtggtacgtgcgggccaaggcgcgggccttcacgaggcgtcgggtgtcgtccagggaccccagggcgtcatcgagcgtgatgggggcgggaagtagcgcgttaacgaccaccagggcctcctgcagccgcggctccgcctccgagggcggaacggccgcgcggatcatctcatattgttcctcggggcgcgctccccagccacatatagccccgagaagagaagccatcgcgggcgggtactggcccttgggcgcgcggacgcaatggggcaggaagacgggaaccgcggggagaggcgggcggccgggactcccgtggaggtgaccgcgctttatgctaccgacgggtgcgttattacctcttcgatcgccctcctcacaaactctctactgggggccgagccggtttatatattcagctacgacgcatacacgcacgatggccgtgccgacgggcccacggagcaagacaggttcgaagagagtcgggcgctctaccaagcgtcgggcgggctaaatggcgactccttccgagtaaccttttgtttattggggacggaagtgggtgggacccaccaggcccgcgggcgaacccgacccatgttcgtctgtcgcttcgagcgagcggacgacgtcgccgcgctacaggacgccctggcgcacgggaccccgctacaaccggaccacatcgccgccaccctggacgcggaggccacgttcgcgctgcatgcgaacatgatcctggctctcaccgtggccatcaacaacgccagcccccgcaccggacgcgacgccgccgcggcgcagtatgatcagggcgcgtccctacgctcgctcgtggggcgcacgtccctgggacaacgcggccttaccacgctatacgtccaccacgaggcgcgcgtgctggccgcgtaccgcagggcgtattatggaagcgcgcagagtcccttctggtttcttagcaaattcgggccggacgaaaaaagcctggtgctcaccactcggtactacctgcttcaggcccagcgtctggggggcgcgggggccacgtacgacctgcaggccatcaaggacatctgcgccacctacgcgattccccacgccccccgccccgacaccgtcagcgccgcgtccctgacctcgtttgccgccatcacgcggttctgttgcacgagccagtacgcccgcggggccgcggcggccgggtttccgctttacgtggagcgccgtattgcggccgacgtccgcgagaccagtgcgctggagaagttcataacccacgatcgcagttgcctgcgcgtgtccgaccgtgaattcattacgtacatttacctggcccattttgagtgtttcagccccccgcgcctagccacgcatcttcgggccgtgacgacccacgaccccaaccccgcggccaacacggagcagccctcgcccctgggcagggaggccgtggaacaatttttttgccacgtgcgcgcccaactgaatatcggggagtacgtcaaacacaacgtgaccccccgggagaccgtcctggatggcgatacggccaaggcctacctgcgcgctcgcacgtacgcgcccggggccctgacgcccgcccccgcgtattgcggggccgtggactccgccaccaaaatgatggggcgtttggcggacgccgaaaagctcctggtcccccgcgggtggcccgcgtttgcgcccgccagtcccggggaggatacggcgggcggcacgccgcccccacagacctgcggaatcgtcaagcgcctcctgagactggccgccacggaacaacaggacaccacgcccccggcgatcgcggcgcttatccgtaatgcggcggtgcagactcccctgcccgtctaccggatatccatggtccccacgggacaggcatttgccgcgctggcctgggacgactgggcccgcataacgcgggacgctcgcctggccgaagcggtcgtgtccgccgaagcggcggcgcaccccgaccacggcgcgctgggcaggcggctcacggatcgcatccgcgcccagggccccgtgatgccccctggcggcctggatgccggggggcagatgtacgtgaatcgcaacgagatattcaacggcgcgctggcaatcacaaacatcatcctggatctcgacatcgccctgaaggagcccgtcccctttcgccggctccacgaggccctgggccactttaggcgcggggctctggctgcggttcagctcctgtttcccgcggcccgcgtggaccccgacgcatatccctgttattttttcaaaagcgcatgtcggcccggcccggcgtccgtgggttccggcagcggactcggcgacgacggggactggtttccctgctacgacgacgccggtgatgaggagtgggcggaggacccgggcgccatggacacatcccacgatcccccggacgacgaggttgcctactttgacctgtgccacgaagtcggccccacggcggaacctcgcgaaacggattcgcccgtgtgttcctgcaccgacaagatcggactgcgggtgtgcatgcccgtccccgccccgtacgtcgtccacggttctctaacgatgcggggggtggcacgggtcatccagcaggcggtgctgttggaccgagattttgtggaggccatcgggagctacgtaaaaaacttcctgttgatcgatacgggggtgtacgcccacggccacagcctgcgcttgccgtattttgccaaaatcgcccccgacgggcctgcgtgcggaaggctgctgccagtgtttgtgatcccccccgcctgcaaagacgttccggcgtttgtcgccgcgcacgccgacccgcggcgcttccattttcacgccccgcccacctatctcgcttccccccgggagatccgtgtcctgcacagcctgggtggggactatgtgagcttctttgaaaggaaggcgtcccgcaacgcgctggaacactttgggcgacgcgagaccctgacggaggtcctgggtcggtacaacgtacagccggatgcgggggggaccgtcgaggggttcgcatcggaactgctggggcggatagtcgcgtgcatcgaaacccactttcccgaacacgccggcgaatatcaggccgtatccgtccggcgggccgtcagtaaggacgactgggtcctcctacagctagtccccgttcgcggtaccctgcagcaaagcctgtcgtgtctgcgctttaagcacggccgggcgagtcgcgccacggcgcggacattcgtcgcgctgagcgtcggggccaacaaccgcctgtgcgtgtccttgtgtcagcagtgctttgccgccaaatgcgacagcaaccgcctgcacacgctgtttaccattgacgccggtacgccatgctcgccgtccgttccctgcagcacctctcaaccgtcgtcttgataacggcgtacggcctcgtgctcgtgtggtacaccgtcttcggtgccagtccgctgcaccgatgtatttacgcggtacgccccaccggcaccaacaacgacaccgccctcgtgtggatgaaaatgaaccagaccctattgtttctgggggccccgacgcacccccccaacgggggctggcgcaaccacgcccatatctgctacgccaatcttatcgcgggtagggtcgtgcccttccaggtcccacccgacgccatgaatcgtcggatcatgaacgtccacgaggcagttaactgtctggagaccctatggtacacacgggtgcgtctggtggtcgtagggtggttcctgtatctggcgttcgtcgccctccaccaacgccgatgtatgtttggtgtcgtgagtcccgcccacaagatggtggccccggccacctacctcttgaactacgcaggccgcatcgtatcgagcgtgttcctgcagtacccctacacgaaaattacccgcctgctctgcgagctgtcggtccagcggcaaaacctggttcagttgtttgagacggacccggtcaccttcttgtaccaccgccccgccatcggggtcatcgtaggctgcgagttgatgctacgctttgtggccgtgggtctcatcgtcggcaccgctttcatatcccggggggcatgtgcaatcacataccccctgtttctgaccatcaccacctggtgttttgtctccaccatcggcctgacagagctgtattgtattctgcggcggggcccggcccccaagaacgcagacaaggccgccgccccggggcgatccaaggggctgtcgggcgtctgcgggcgctgctgttccatcatcctctcgggcatcgcagtgcgattgtgttatatcgccgtggtggccggggtggtgctcgtggcgcttcactacgagcaggagatccagaggcgcctgtttgatgtatgacgtcacatccaggccggcggaaaccggaacggcatatgcaaattggaaactgtcctgtcttggggcccacccacccgacgcgtcatatgcaaatgaaaatcggtcccccgaggccacgtgtagcctggatcccaacgaccccgcccatgggtcccaattggccgtcccgttaccaagaccaacccagccagcatatccacccccgcccgggtccccgcggaagcggaacggtgtatgtgatatgctaattaaatacatgccacgtacttatggtgtctgattggtccttgtctgtgccggaggtggggcgggggccccgcccggggggcggaacgaggaggggtttgggagagccggccccggcaccacgggtataaggacatccaccacccggccggtggtggtgtgcagccgtgttccaaccacggtcacgcttcggtgcctctccccgattcgggcccggtcgctcgctaccggtgcgccaccaccagaggccatatccgacaccccagccccgacggcagccgacagcccggtcatggcgactgacattgatatgctaattgacctcggcctggacctctccgacagcgatctggacgaggacccacccgagccggcggagagccgccgcgacgacctggaatcggacagcagcggggagtgttcctcgtcggacgaggacatggaagacccccacggagaggacggaccggagccgatactcgacgccgctcgcccggcggtccgcccgtctcgtccagaagaccccggcgtacccagcacccagacgcctcgtccgacggagcggcagggccccaacgatcctcaaccagcgccccacagtgtgtggtcgcgcctcggggcccggcgaccgtcttgctcccccgagcagcacgggggcaaggtggcccgcctccaacccccaccgaccaaagcccagcctgcccgcggcggacgccgcgggcgtcgcaggggtcggggtcgcggtggtcccggggccgccgatggtttgtcggacccccgccggcgtgcccccagaaccaatcgcaacccggggggaccccgccccggggcggggtggacggacggccccggcgccccccatggcgaggcgtggcgcggaagtgagcagcccgacccacccggaggcccgcggacacggggcgtgcgccaagcaccccccccgctaatgacgctggcgattgcccccccgcccgcggacccccgcgccccggccccggagcgaaaggcgcccgccgccgacaccatcgacgccaccacgcggttggtcctgcgctccatctccgagcgcgcggcggtcgaccgcatcagcgagagctttggccgcagcgcacaggtcatgcacgacccctttggggggcagccgtttcccgccgcgaatagcccctgggccccggtgttggcgggccaaggagggccctttgacgccgagaccagacgggtctcctgggaaaccttggtcgcccacggcccgagcctctatcgcacttttgccggcaatcctcgggccgcatcgaccgccaaggccatgcgcgactgcgtgctgcgccaagaaaatttcatcgaggcgctggcctccgccgacgagacgctggcgtggtgcaagatgtgcatccaccacaacctgccgctgcgcccccaggaccccattatcgggacggccgcggctgtgctggataacctcgccacgcgcctgcggccctttctccagtgctacctgaaggcgcgaggcctgtgcggcctggacgaactgtgttcgcggcggcgtctggcggacattaaggacattgcatccttcgtgtttgtcattctggccaggctcgccaaccgcgtcgagcgtggcgtcgcggagatcgactacgcgacccttggtgtcggggtcggagagaagatgcatttctacctccccggggcctgcatggcgggcctgatcgaaatcctagacacacaccgccaggagtgttcgagtcgtgtctgcgagttgacggccagtcacatcgtcgcccccccgtacgtgcacggcaaatatttttattgcaactccctgttttaggtacaataaaaacaaaacatttcaaacaaatcgccccacgtgttgtccttctttgctcatggccggcggggcgtgggtcacggcagatggcgggggtgggcccggcgtacggcctgggtgggcggagggaactaacccaacgtataaatccgtccccgctccaaggccggtgtcatagtgcccttaggagcttcccgcccgggcgcatccccccttttgcactatgacagcgacccccctcaccaacctgttcttacgggccccggacataacccacgtggcccccccttactgcctcaacgccacctggcaggccgaaacggccatgcacaccagcaaaacggactccgcttgcgtggccgtgcggagttacctggtccgcgcctcctgtgagaccagcggcacaatccactgctttttctttgcggtatacaaggacacccaccacacccctccgctgattaccgagctccgcaactttgcggacctggttaaccacccgccggtcctacgcgaactggaggataagcgcggggtgcggctgcggtgtgcgcggccgtttagcgtcgggacgattaaggacgtctctgggtccggcgcgtcctcggcgggagagtacacgataaacgggatcgtgtaccactgccactgtcggtatccgttctcaaaaacatgctggatgggggcctccgcggccctacagcacctgcgctccatcagctccagcggcatggccgcccgcgcggcagagcatcgacgcgtcaagattaaaattaaggcgtgatctccaacccccccatgaatgtgtgtaaccccccaaaaaaataaacagccgtaacccaatcaaaccaggcgtggtgtgagtttgtggacccaaagccctcagagacaacgcgacaggccagtatggaccgtgatacttttatttattaactcacaggggcgcttaccgccacaggaataccagaataatgaccaccactatcgcgaccaccccaaatacagcatggcgccccaccacgccacaacagccctgtcgccggtatggggcatgatcagacgagccgcgagccgcgcgttgggccctgtacagctcgcgcgaattgaccctaggaggccgccacgcgcccgagttttgcgttcgtcgctggtcgtcgggcgccaaagccccggacggctgttcggtcgaacgaacggccacgacagtggcataggttggggggtggtccgacatagcctcggcgtacgtcgggaggcccgacaagaggtcccttgagatgtcgggtggggccacaagcctggtttccggaagaaacaggggggttgccaataacccgccagggccaaaactccggcgctgcgcacgtcgttcggcgcggcgccgggcgcgccgagcggctcgctgggcggcttggcgtgagcggccccgctccgacgcctcgccctctccggaggaggttggcggaattggcacggacgacaggggcccagcagagtacggtggaggtgggtccgtgggggtgtccagatcaataacgacaaacggcccctcgttcctaccagacaagctatcgtaggggggcgggggatcagcaaacgcgttccccgcgctccatagacccgcgtcgggttgcgccgcctccgaagccatggatgcgccccaaagccacgactcccgcgcgctaggtccttggggtaagggaaaaggccctactccccatccaagccagccaagttaacgggctacgccttcggggatgggactggcaccccggcggattttgttgggctggtacgcgttgcccaaccgagggccgcgtccacgggacgcgccttttataaccccgggggtcattcccaacgatcacatgcaatctaactggctcccctctccccccctctcccctctccccccctctcccctctccccccctctcccctctccccccctctcccctctccccccctctcccctctccccccctctcccctctccccccctctcccctctccccccctctcccctctccccccctctcccctctccccccctctcccctctccccccctgctctttccccgtgacacccgacgctggggggcgtggctgccgggaggggccgcggatgggcggggcctactcggtctcccgcccccgcccccgaaccgccccgccggccttgcccccctttgatcccctgctacccccaacccgtgctcgtggtgcgggttgggtggggggggggagtgtgggcgggggtgtgcgggaggtgtcggtggtggtggtggtggtaggaatggtggtgaggggggggggcgctggttggtcaaaaaagggagggacgggggccggcagaccgacggcgacaacgctccccggcggccgggtcgcggctcttacgagcggcccggcccgcgctcccaccccccgggccgtgtccttgctttccccccgtctccccccccctccttctcctcctcctcctcctcgtttttccaaaccccgcccacccggcccggcccggcccggccaccgccgcccacccacccacctcgggagacccagccccggtcccccgttccccgggggccgttatctccagcgccccgtccggcgcgccgccccccgccgctaaaccccatcccgcccccgggaccccacatataagcccccagccacacgcaagaacagacacgcagaacggctgtgtttatttaaataaaccgatgtcggaataaacaaacacaaacacccgcgacggggggacggagggaggggggtgacgggggacgggaacagccacaaaaaacacccacaaaaaaaaacagccacccccgacacccccccccacccccagtctcttcgccttttcccccccaccccacgcccccactgagcccggtcgatcgacgagcacccccgcccccgcccctgccccggcgacccccggcccgcacgatcccgacaacaataacaaccccaacggaaagcggcggggtgtgggggggggcgaggaacaaccgaggggaacgggggatggaaggacgggaagtggaagtcctgatacccatcctacacccccctgccttccaccctccggccccccgcgagtccacccgccggccggctaccgagaccgaacacggcggccgccgcagccgccgcagccgccgccgacaccgcagagccggcgcgcgcacacacaagcggcagaggcagaaaggcccagagtcattgtttatgtggccgcgggccagcagacggcccgcgacacccccccccccgcccgtgtgggtatccggccccccgccccgcgccggtccattaagggcgcgcgtgcccgcgagatatcaatccgttaagtgctctgcagacaggggcaccgcgcccggaaatccattaggccgcagacgaggaaaataaaattacatcacctacccacgtggtgctgtggcctgtttttgctgcgtcatctgagcctttataaaagcgggggcgcggccgtgccgatcgcgggtggtgcgaaagactttccgggcgcgtccgggtgccgcggctctccgggcccccctgcagccggggcggccaaggggcgtcggcgacatcctccccctaagcgccggccggccgctggtctgttttttgttttccccgtttcgggggtggggggggttgcggtttctgtttctttaacccgtctggggtgtttttcgttccgtcgccggaatgtttcgttcgtctgtcccctcacggggcgaaggccgcgtacggcccgggacgagggggcccccgaccgcggcggtccgggccccgtccgggcccgctcgccggcacgcgacgcgaaaaaggccccccggaggcttttccgggttcccggcccggggcctgagataaacaatcggggttaccgccaacggccggcccccgtggcggcccggcccggggccccggcggacccaaggggccccggcccggggccccacaacggcccggcgcatgcgctgtggtttttttttctcggtgttttgtcgggctccgtcgcctttcctgttctcgcttctccccccccccccttcttcacccccagtaccctcctccctcccttcctcccccgttatcccactcgtcaagggcgccccggtgtggttcaacaaagacgccgcgtttccaggtaggttagacacctgcttctccccaatagaggggggggacccaaacgacagggggcgccccagaggctaaggtcggccacgccactcgcgggtgggctcgtgttacagcacaccagcccgttcttttccccccctcccacccttagtcagactctgttacttacccgtccgaccaccaactgcccccttatctaagggccggctggaagaccgccagggggtcggccggtgtcgctgtaaccccccacgccaatgacccacgtactccaagaaggcatgtgtcccaccccgcctgtgtttttgtgcctggctctctatgcttgggtcttactgccgggggggggggagtgcgggggagggggggtgtggaaggaaatgcacggcgcgtgtgtaccccccctaaagttgttcctaaagcgaggatatggaggagtggcgggtgccgggggaccggggtgatctctggcacgcgggggtgggaagggtcgggggaggggggatggggtaccggcccacctggccgacgcgggtgcgcgtgcctctgcacaccaaccccacgtcccccggcggtctctaagaagcaccgccccccctccttcataccaccgagcatgcctgggtgtgggttggtaaccaacacgcccatcccctcgtctcctgtgattctctggctgcaccgcattcttgttttctaactatgttcctgtttctgtctccccccccacccctccgccccaccccccaacacccacgtctgtggtgtggccgacccccttttgggcgccccgtcccgccccgccacccctcccgtcctttgttgccctatagtgtagttaacccccccccgccctttgtggcggccagaggccaggtcagtccgggcgggcaggcgctcgcggaaacttaacacccacacccaacccactgtggttctggctccatgccagtggcaggatgctttcggggatcggtggtcaggcagcccgggccgcggctctgtggttaacaccagagcctgcccaacatggcacccccactcccacgcacccccactcccacgcacccccactcccacgcacccccactcccacgcacccccactcccacgcacccccactcccacgcacccccactcccacgcacccccactcccacgcacccccactcccacgcacccccgagatccatccaacacagacagggaaaagatacaaaagtaaacctttatttcccaatagacagcaaaaatcccctgagttttttattagggccaacactaaagacccgctggtgtgtggtgcccgtgtctttcacttttcccctccccgacacggattggctggtgtagtgggcgcggccagagaccacccagcgcccgacccccccctccccacaaacacggggggcgtcccttattgttttccctcgtcccgggtcgacgccccctgctccccggaccacgggtgccgagaccgcaggctgcggaagtccagggcgcccactagggtgccctggtcgaacagcatgttccccacgggggtcatccagaggctgttccactccgacgcgggggccgtcgggtactcggggggcatcacgtggttacccgcggtctcggggagcagggtgcggcggctccagccggggaccgcggcccgcagccgggtcgccatgtttcccgtctggtccaccaggaccacgtacgccccgatgttccccgtctccatgtccaggatgggcaggcagtcccccgtgatcgtcttgttcacgtaaggcgacagggcgaccacgctagagacccccgagatgggcaggtagcgcgtgaggccgcccgcgggggcggccccggaagtctccgcgtggcgcgtcttccgggcacacttcctcggcccccgcggcccagaagcagcgcgggggccgagggaggtttcctcttgtctccctcccagggcaccgacggccccgcccgaggaggcggaagcggaggaggacgcggccccggcggcggaagaggcggcccccgcgggagtcggggccgaggaggaagaggcagaggaggaagaggcggaggccgccgaggacgtcaggggggtcccgggcccaccctggccgcgcccccccggccctgagtcggagggggggtgcgtcgccgccctcttggcccctgccggcgcgagggggggacgcgtggactggggggaggggttttcctggcccgacccgcgcctcttcctcggacgcaccgccgcctcctgctcgacagaggcggcggaggggagcgggggggcgccggagggggcggcgccgcgggagggcccgtgtccaccctccacgcccggcccccccgagccgcgcgccaccgtcgcacgcgcccggcacagactctgttcttggttcgcggcctgagccagggacgagtgcgactggggcacacggcgcgcgtccgcgggggccggggcgcgggggccgggccccggaggcggcgctcgcacgcacggggccacggccgcgcgggggcgcgcgggtcccgacgcggccgaggacgcggtgggcccggggcggggggcggagcctggcatgggcgccgcggggggcctgtggggagaggccgggggggagtcgctgatcactatggggtctctgttgtttgcaaggggggcgggtctgttgacaagggggcccgtccggcccctcggccgccccgcctccgcttcaacaaccccaaccccaaccccaacccccccggaggggccagacgccccccgcggcgccgcggctcgcgactggcgggagccgccgccgccgccgctgctgttggtggtggtgttggtgttactgctgccgtgtggcccgatgggcgccgaggggggcgctgtccgagccgcggccggctggggggctgcgtgagacgccccgcccgtcacggggggcgcggcggcgcctctgcgtgggggggcgcggggcgtccggcggggggcgggcggtacgtagtctgctgcaagagacaacggggggcgcgatcaggttacgccccctcccaggccctccctttccgcgcccgccctttcctcgcccccccgcccgcctattcctccctcccccctcctcctcctcctcccccagggtcctcgccgcccccccgcctcaccgtcgtccaggtcgtcgtcatcctcgtccgtggtgggctcagggtgggtgggcgacagggccctcaccgtgtgcccccccagggtcaggtaccgcggggcgaaccgctgattgcccgtccagataaagtccacggccgtgcccgccctgacggcctcctcggcctccatgcgggtctgggggtcgttcacgatcgggatggtgctgaacgacccgctgggcgtcacgcccactatcaggtacaccagcttggcgttgcacagcgggcaggtgttgcgcaattgcatccaggttttcatgcacgggatgcagaagcggtgcatgcacgggaaggtgtcgcagcgcaggtggggcgcgatctcatccgtgcacacggcgcacacgtcgccctcgtcgctccccccgtcctctcgagggggggcgcccccgcaactgccggggtcttcctcgcggggggggctcccccccgagaccgcccccccatccacgccctgcggccccagcagccccgtctcgaacagttccgtgtccgtgctgtccgcctcggaggcggagtcgtcgtcatggtggtcggcgtccccccgcccccccacttcggtctccgcctcagagtcgctgctgtccggcaggtctcggtcgcagggaaacacccagacatccggggcgggctaaggggaaaaaaaggggggcgggtaagaatggggggatttcccgcgtcaatcagcgcccacgagttccccctctccccccccccgcctcacaaagtcctgcccccctgctggcctcggaagaggggggagaaaggggtctgcaaccaaaggtggtctgggtccgtcctttggatcccgacccctcttcttccctcttctcccgccctccagacgcaccggagtcgggggtcccacggcgtcccccaaatatggcgggcggctcctccccacccccctagatgcgtgtgagtaagggggccctgcgtatgagtcagtggggaccacgccccctaacacggcgaccccggtccctgtgtgtttgttgtgggggcgtgtctctgtgtatgagtcagggggtcccacggcgaccccgggccctgcgtctgagtcaaaggggccatgtgtatgtgttggggggtctgtatatataaagtcagggggtcacatggcgacccccaacagggcgaccccggtccctgtatatatagggtcagggggttccgcgccccctaacatggcgcccccggtccctgtatatatagtgtcacggggttccacgccccctaacatggcgcccggctcccgtgtatgagtgggggtcccccaacatggcggccggttccagtgtaagggtcgggggtcccccaacatggcgccccccaatatggcgccccccaatatggcgccccagacatggcgcccggcccctcacctcgcgctgggggcggccctcaggccggcgggtactcgctccggggcggggctccatgggggtcgtatgcggttggagggtcgcggacggagggtccctgggggtcgcaacgtaggcggggcttctgtggtgatgcggagagggggcggcccgagtctgcctggctgctgcgtctcgctccgagtgccgaggtgcaaatgcgaccagactgtcgggccagggctaacttataccccacgcctttcccctccccaaaggggcggcagtgacgattcccccaatggccgcgcgtcccaggggaggcaggcccaccgcggggcggccccgtccccggggaccaacccggcgcccccaaagaatatcattagcatgcacggcccggcccccgatttgggggaccaacccggtgtcccccaaagaaccccattagcatgcccctcccaccgacgcaacaggggcttggcctgcgtcggtgccccggggcttcccgccttcccgaagaaactcattaccatacccggaaccccaggggaccaatgcgggttcattgagcgacccgcgggccaatgcgcgaggggccgtgtgttccgccaaaaaagcaattagcataacccggaaccccaggggagtggttacgcgcggcgcgggaggcggggaataccggggttgcccattaagggccgcgggaattgccggaagcgggaagggcggccggggccgcccattaatgagtttctaattaccataccgggaagcggaacaaggcctcttgcaagtttttaattaccataccgggaagtgggcggcccggcccattgggcggtaactcccgcccaatgggccgggccccgaagactcggcggacgctggttggccgggccccgccgcgctggcggccgccgattggccagtcccgcccccgaggcggcccgccctgtgagggcgggctggctccaagcgtatatatgcgcggctcctgccatcgtctctccggatctagagatctccggaattaattcgccctatagtgagtcggaattaggagcaatacccccgatccagcgtccaacaagaaccgccaccgccagagccacctccacctgacccgccgcctcctagatcttcttctgagatgagtttttgttctgaattcccagatccttccgtggacagtgtctggaactcgtgcactttgctgccggctccctggccctcctgcgtcagcgcctgcacctgcaccaggtacgtggtatccggagcaaggtcatccagggtcacggagaagccttccgtgcggcgcacattatagctgttggcatcccccttcttgcggtaggtgacttcgtacttccacacacggctctgctgtgacaccgggatgctccaggtgacactcagggaggtggtgcttcggtcctccagcctcactttggggggctctgtttggttaatactgacgctggcagtccggaagcttcggctagtcaccaggcctgagacaccattgcgtgcttcgacagcgaaggtatagttcatgtggggctccaggtcactgactgtcacactcgtgcgggtcagggcgtgaggaggttctgaatagcgcacgctcgcctcacagggcccacactcgccagactctggccagcactgttcgcaagtgacactgtagacaatgtcctggcggccaccagtgtccttgggagctgtccaacgcagttctactttggcacccatgccaatggccgtgaggtagttgggggcagagggtggacgtgtgcaagacatggacagtgggtcctcaggtgccctgaaatagccttcttcacactggcaggaggtggcaccctctgtggatggcagggtatgctctggacactccaggcaagggctctcagatgcctcagacttgaagaatcctggagaacaggctcggcaggcatcctcgaccttctcgtagccttcctggcacaggcactgcccgatgggcaccagccactcgccatccaccgtgcagtgcatgagaggcccctcgcccccataaggcaccacggcatggtccacgcaggtaccggccaccgtggccaggggttgtgtatcggagacagcgacagcaatggtctcggggaagcgagccaagctctgcagcatctcgggacacttcttgtagtagacgcgaacggagagcagcgccacgcaggcgccgatgtcctggaaggccaggtagaagcccttccgggtaaggggccccaccatgcgctcctctacgttcagcttgacattgcgagcctcgaagtcactgctgaccgtgatctcgtcaggggcgatggtgtcaatcttggtgaactggcgcttctggaagttggtgccatagtccacatctgactctgcatagtagaggttgaaggtctctttgcatgagctggcgccacccgggaagctgttacagtctcgcaccgtgaacttgagctcaataaagatgcgctcggcctcctcccggtacacccagttggtgcggagccagttgtcctggtcgccggataccacgttgcacaccgagtacatgtagataggcatgtcgtccatgatgttctgcatcaggtcccaccctttgccataggggtgcgtgagccagccgagctctcccttcattgctgcgaagtccaacaaaacaacttcctttccctgtgccgccgcggccgccagcgcgcaaccccacagcagcgccaggcagaaaccgactgcccggagctccatggtcgacccgggatccggtaccactttgtgcggccagcttcctaggagatccctagctagagtcggtgtcttctatggaggtcaaaacagcgtggatggcgtctccaggcgatctgacggttcactaaaccagctctgcttatatagagctcggggagcagaagcgcgcgaacagaagcgagaagcgaactgattggttagttcaaataaggcacagggtcatttcaggtccttggggcaccctggaaacatctgatggttctctagaaactgctgagggcgggaccgcatctggggaccatctgttcttggccctgagcggggcaggaactgcttaccacagatatcctgtttggcccatattctcctgttccaactgttcttggccctgagcggggcaggaactgcttaccacagatatcctgtttggcccatattctcctgtttctctgttcctgaccttgatcctagcttgccaaacctacaggtggggtctttcattcccataggcggttacctgggactgtgcggttgggacggcgcccgtgggcccgggcggccgggggcggcgggggccgcgatggcggcggcggcgggccatggagacagagagcgtgccggggtggtagagtttgacaggcaagcatgtgcgtgcagaggcgagtagtgcttgcctgtctaactcgctcgtctcggccgcggggggcccgggctgcgccgccgcgctttaaagggccgcgcgcgacccccggggggtgtgtttcggggggggcccgttttccgctcctccccccgctcctccccccgctcctccccccgctcctccccccgctcctccccccgctcctccccccgctcctccccccgctcctccccccgctcctccccccgctcctccccccgctcctccccccgctcctccccccgctcctccccccgctcctccccccgctcctccccccgctcctccccccgctcctccccccgctcctccccccgctccccaacgcccgccgcgcgcgcgcacgccgcccggaccgccgcccgccttttttgcgcgccgccccgcccgcggggggcccgggctgccacaggtgtaacaacaccaacagaacaccaacagcacggcgcaccggcgactccggttcctcatccacacgtcacacgtcacgtcatccaccacacctgcccaccaacacaactcacagcgacaactcaccgcgcaacaactcctgttcctcatccacacgtcaccgcgcaccccccgctcctccagacgtcccccagcgcaacacgccgctcctgtcacacaccaccgccccagccctccccagccccagccctccccagccccagccctccccggccccagccctccccggccccagccctccccggccccagccctccccggccccagccctccccggccccagccctccccggccccagccctccccggccgcgtcccgcgctccctcgggggggttcgggcatctctacctcagtgccgccaatctcaggtcagagatccaaaccctccgggggcgcccgcgcaccaccaccgcccctcgccccctcccgcccctcgccccctcccgcccctcgccccctcccgcccctcgccccctcccgcccctcgccccctcccgcccctcgccccctcccgcccctcgccccctcccgcccctcgccccctcccgcccctcgccccctcccgcccctcgccccctcccgcccctcgccccctcccgcccctcgccccctcccgcccctcgccccctcccgcccctcgccccctcccgcccctcgccccctcccgcccctcgccccctcccgcccctcgccccctcccgcccctcgccccctcccgcccctcgccccctcccgcccctcgaaataaacaacgctactgcaaaactaaatcaggtcgttgtcgtttattgcgtcttcgggtttcgcaagcgccccgccccgtcccggcccgttacagcaccccgtccccctcgaacgcgccgccgtcgtcgtcgtcccaggcgccttcccagtccacaacttcccgtcgcgggggcgtggccaagcccgcctccgcccccagcacctccacggcccccgccgccgccagcacggtgccgctgcggcccgtggccgaggcccagcgaatcccgggcaacgccggcggcagggcccccgggccgtcgtcgtcgtcgtcgccgccgcgcagcaccagcgggggggcgtcgtcgtcgggctccagcagggcgcgggcgcaaaagtccctccgcggcccgcgccaccgggccgggccggcgcgcaccgcctcgcgccccagcgccacgtacacgggccgcagcggcgcgcccaggccccagcgcgcgcaggcgcggtgcgagtgggcctcctcctcgcagaagtccggcgcgccgggcgccatggcgtcggtggtccccgaggccgccgcccggccgtccagcgccggcagcacggcccggcggtactcgcgcggggacatgggcaccggcgtgtccgggccgaagcgcgtgcgcacgcggtagcgcacgttgccgccgcggcacaggcgcagcggcggcgcgtcggggtacaggcgcgcgtgcgcggcctccacgcgcgcgaagacccccgggccgaacacgcggcccggggccagcaccgtgcggcgcaggtcccgcgccgccggccagcgcacggcgcactgcacggcgggcagcaggtcgcacgccaggtaggcgtgctgccgcgacaccgcgggcccgtcggcgggccagtcgcaggcgcgcacggtgttgaccacgatgagccgccggtcgccggcgctggcgagcagccccagaaactccacggccccggcgaaggccaggtcccgcgtggacagcagcagcacgccctgcgcgcccagcgccgacacgtcgggggcgccggtccagttgcccgcccaggcggccgtgtccggcccgcacagccggttggccagggccgccagcaggcaggacagcccgccgcgctcggcggaccactccggcggcccccccgaggccccgccgccggccaggtcctcgcccggcagcggcgagtacagcaccaccacgcgcacgtcctcggggtcggggatctggcgcatccaggccgccatgcggcgcagcgggcccgaggcgcgcagggggccaaagaggcggcccccggcggccccgtgggggtgggggttatcgtcgtcgtcgccgccgccgcacgcggcctgggcggcggcggcgggcccggcgcaccgcgcggcgatcgaggccagggcccgcgggtcaaacatgagggccggtcgccaggggacggggaacagcgggtggtccgtgagctcggccacggcgcgcggggagcagtaggcctccagggcggcggccgcgggcgccgccgtgtggctgggccccgggggctgccgccgccagccgcccagggggtcggggccctcggcgggccggcgcgacagcgccacggggcgcgggcgggcctgcgccgcggcggcccggggcgccgcgggctgggcgggggcgggctcgggccccgggggcgtggaggggggcgcggggaggggggcgcgggcgtccgagccgggggcgtccgcgccgctcttcttcgtcttcgggggtcgcgggccgccgcctccgggcggccgggccgggccgggactcttgcgcttgcgcccctcccgcggcgcggcggaggcggcggcggccgccagcgcgtcggcggcgtccggtgcgctggcggccgccgccagcagggggcgcaggctctggttctcaaacagcaggtccgcggcggcggcggccgcggagctcggcaggcgcgggtcccgcggcagcgcggggcccagggccccggcgaccaggctcacggcgcgcacggcggccacggcggcctcgctgccgccggccacgcgcaggtccccgcgcaggcgcatgagcaccagcgcgtcgcgcacgaaccgcagctcgcgcagccacgcgcgcaggcggggcgcgtcggcgtgcggcggcggcggggaagcggggcccgcgggtccctccggccgcggggggctggcgggccgggccccggccagccccgggacggccgccaggtcgccgtcgaagccctcggccagcgcctccaggatcccgcggcaggcggccaggcactccacggccacgcggccggcctgggcgcggcgcccggcgtcgtcgtcggcgtcggcgtggcgggcggcgtcggggtcgtcgccccccgcgggggaggcgggcgcggcggacagccgccccagggcggcgaggatccccgcggcgccgtacccggcgggcaccgcgcgctcgcccggtgcggcggcggcggcgacgacggcggcggcgaccccctcgtcatctgcgccggcgccggggctccccgcggcccccgtcagcgccgcgttctcgcgcgccaacaggggcgcgtaggcgcggcgcaggctggtcagcaggaagcccttctgcgcgcggtcgtatcggcggctcatggccacggcggccgccgcgtgcgccaggccccagccgaagcggccggccgccatggcgtagcccaggtggggcacggcccgcgccacgctgccggtgatgaaggagctgctgttgcgcgcggcgcccgagatccggaagcaggcctggtccagcgccacgtccccggggaccacgcgcgggttctggagccaccccatggcctccgcgtccggggtgtacagcagccgcgtgatcagggcgtactgctgcgcggcgtcgcccagctcgggcgcccacacggccgccggggcgcccgaggcctcgaaccggcgtcgcgcctcctccgcctcgggcgccccccagaggcccgggcggctgtcgcccaggccgccgtacagcacccgccccgggggcgggggcccggcgccgggccacggctccccgctgacgtacccgtcgcgatagcgcgcgtagaaggcgccggaggccgcgtcggcgtccagctcgacccgccggggctgcccggccgtgaagcggcccgtggcgtcgcggccggccaccgccgcgcgggcccggcggcgctcgatgcggcccgcggaggccgcgggggtcctcgccgccgcccggggcttgggcgcggcctcggagagggggggtggcccgggcgggggcggcgtccgcccgggggcttccggcgccgcgctcgacggaccccgcccgacggcccgcgcctcgcgtgcgcggtcggccgcgtcgttgccgtcgtcgtcctcgtcctcgtcggacgacgaggacgaagaggatgcggacgacgaggacgaggacccggagtccgacgaggtcgatgacgccgatggccgccgccggccgtgacgacgtctccgcggcggctgggccggcgggcgcggcgacaggcggtccgtggggtccggatacgcgccgcgtagcggggcctcccgtgcgcggccccgggccggggcccggtcgccggcggcgtcggctgcgtcgtcgtactcgtccccgtcatcgtcgtcggctcgaaaggcgggggtccggggcggcgaggccgcggggtcgggcgtcgggatcgtccggacggcctcctctaccatggaggccagcagggccagctgtcgcggcgagacggcgtccccggcgtcctcgccggcgtcggtgcccgccgcgggggccctcccgtcccgccgggcgtcgtcgaggtcgtgggggtggtcggggtcgtggtcggggtcgtccccgccctcctccgtctccgcgccccacccgagggccccccgctcgtcgcggtctgggctcggggtgggcggcggcccgtcggtggggcccggggagccggggcgctgcttgttctccgacgccatcgccgatgcggggcgatcctccggggatacggctgcgacggcggacgtagcacggtaggtcacctacggactctcgatggggagggggcgagacccacggaccccgacgacccccgccgtcgacgcggaactagcgcggaccggtcgatgcttgggtgggaaaaaggacagggacggccgatccccctcccgcgcttcgtccgcgtatcggcgtcccggcgcggcgagcgtctgacggtctgtctctggcggtcccgcgtcgggtcgtggatccgtgtcggcagccgcgctccgtgtggacgatcggggcgtcctcgggctcatatagtcccaggggccggcgggaaggaggagcagcggaggccgccggccccccgccccccaggcgggcccgccccgaacggaattccattatgcacgaccccgccccgacgccggcacgccgggggcccgtggccgcggcccgttggtcgaacccccggccccgcccatccgcgccatctgccatgggcggggcgcgagggcgggtgggcccgcgccccgccccgcatggcatctcattaccgcccgatccggtggtttccgcttccgttccgcatgctaacgaggaacgggccgggggcggggcccgggccccgacttcccggttcggcggtaatgagatacgagccccgcgcgcccgttggccgtccccgggcccccggtcccgcccgccggacgttgggaccaacgggacggcgggcggcccaagggccgcccgccttgccgcccccccattggccggcgggcgggaccgccccaagggggcggggccgccgggtaaaagaagtgagaacgcgaagcgttcgcacttcgtcccaatatatatatattattagggcgaagtgcgagcactggcgccgtgcccgactccgcgccggccccgggggcgggcccgggcggcggggggcgggtctctccggcgcacataaaggcccggcgcgaccgacgcccgcagacggcgccggccacgaacgacgggagcggctgcggagcacgcggaccgggagcgggactcgcagagggccgtcggagcggacggcgtcggcatcgcgacgccccggctcgggatcgggatcgcatcggaaagggacacgcggaaagacccacccaccccacccacgaaacacaggggacgcaccccgggggcctccgacgacagaaacccaccggtccgcctttgtgcacgggtaagcaccttgggtgggcggaggagggggggacgcgggggcggaggaggggggacgcgggggcggaggaggggggacgcgggggcggaggaggggggacgcgggggcggaggaggggggacgcgggggcggaggagggggctcacccgcgttcgtgccttcccgcaggaggaacgtcctcgtcgaggcgaccggcggcgaccgttgcgtggaccgcttcctgctcgtcgggcggggggaagccactgtggtcctccgggacgttttctggatggccgacatttccccaggcgcttttgcgccttgtgtaaaagcgcggcgtcccgctctccgatccccgcccctgggcacgcgcaagcgcaagcgcccttcccgccccctctcatcggagtctgaggtagaatccgatacagccttggagtctgaggtcgaatccgagacagcatcggattcgaccgagtctggggaccaggatgaagccccccgcatcggtggccgtagggccccccggaggcttggggggcggttttttctggacatgtcggcggaatccaccacggggacggaaacggatgcgtcggtgtcggacgaccccgacgacacgtccgactggtcttatgacgacattcccccacgacccaagcgggcccgggtaaacctgcggctcacgagctctcccgatcggcgggatggggttatttttcctaagatggggcgggtccggtctacccgggaaacgcagccccgggcccccaccccgtcggccccaagcccaaatgcaatgctacggcgctcggtgcgccaggcccagaggcggagcagcgcacgatggacccccgacctgggctacatgcgccagtgtatcaatcagctgtttcgggtcctgcgggtcgcccgggacccccacggcagtgccaaccgcctgcgccacctgatacgcgactgttacctgatgggatactgccgagcccgtctggccccgcgcacgtggtgccgtttgctgcaggtgtccggcggaacctggggcatgcacctgcgcaacaccatacgggaggtggaggctcgattcgacgccaccgcggaacccgtgtgcaagcttccttgtttggagaccagacggtacggcccggagtgtgatcttagtaatctcgagattcatctcagcgcgacaagcgatgatgaaatctccgatgccaccgatctggaggccgccggttcggaccacacgctcgcgtcccagtccgacacggaggatgccccctcccccgttacgctggaaaccccagaaccccgcgggtccctcgctgtgcgtctggaggatgagtttggggagtttgactggaccccccaggagggctcccagccctggctgtctgcggtcgtggccgataccagctccgtggaacgcccgggcccatccgattctggggcgggtcgcgccgcagaagaccgcaagtgtctggacggctgccggaaaatgcgcttctccaccgcctgcccctatccgtgcagcgacacgtttctccggccgtgagtccggtcgccccgacccccttgtatgtccccaaataaaagaccaaaatcaaagcgtttgtcccagcgtcttaatggcgggaagggcggagagaaacagaccacgcgtacatggggggtgtttgggggtttattgacatcggggctacagggtggtaaccggatagcagatgtgaggaagtctgggccgttcgccgcgaacggcgatcagagggtccgtttcttgcggaccacggcccggtgatgtgggttgctcgtctgggatctcgggcatgcccatacacgcacaacacggacgccgcaccggatgggacgtcgtaagggggcctggggtagctgggtggggtttgtgcagagcaatcagggaccgcagccagcgcatacaatcgcgctcccgtccgtttgtcccgggcagtaccacgccgtactggtattcgtaccggctgagcagggtctccagggggtggttgggggccgcggggaacggggtccacgccacggtccactcgggcaaaaaccgagtcggcacggcccacggttctcccacccacgcgtctggggtcttgatggcgataaatcttaccccgagccggattttttgggcgtattcgagaaacggcacacacagatccgccgcgcctaccacccacaagtggtagaggcgaggggggctgggttggtctcggtgcagcagtcggaagcacgccacggcgtccacgacctcggtgctctccaaggggctgtcctccgcaaacaggcccgtggtggtgtttggggggcagcgacaggacctagtgcgcacgatcgggcgggtgggtttgggtaagtccatcagcggctcggccaaccgtcgaaggttggccggacgaacgacgaccggggtacccaggggttctgatgccaaaatgcggcactgcctaagcaggaagctccacagggccgggcttgcgtcgacggaagtccggggcagggcgttgttctggtcaaggagggtcattacgttgacgacaacaacgcccatgttggtatattacaggcccgtgtccgatttggggcacttgcagatttgtaaggccacgcacggcggggagacaggccgacgcgggggctgctctaaaaatttaagggccctacggtccacagacccgccttcccgggggggcccttggagcgaccggcagcggaggcgtccgggggaggggagggtgatttacgggggggtaggtcagggggtgggtcgtcaaactgccgctccttaaaaccccggggcccgtcgttcggggtgctcgttggttggcactcacggtgcggcgaatggcctgtcgtaagttttgtcgcgtttacgggggacagggcaggaggaaggaggaggccgtcccgccggagacaaagccgtcccgggtgtttcctcatggccccttttataccccagccgaggacgcgtgcctggactccccgcccccggagacccccaaaccttcccacaccacaccacccggcgatgccgagcgcctgtgtcatctgcaggagatcctggcccagatgtacggaaaccaggactaccccatagaggacgaccccagcgcggatgccgcggacgatgtcgacgaggacgccccggacgacgtggcctatccggaggaatacgcagaggagctttttctgcccggggacgcgcccggtccccttatcggggccaacgaccacatccctcccccgtgtggcgcatctccccccggtatacgacgacgcagccgggatgagattggggccacgggatttaccgcggaagaactggacgccatggacagggaggcggctcgagccatcagccgcggcggcaagcccccctcgaccatggccaagctggtgactggcatgggctttacgatccacggagcgctcaccccaggatcggaggggtgtgtctttgacagcagccacccagattacccccaacgggtaatcgtgaaggcggggtggtacacgagcacgagccacgaggcgcgactgctgaggcgactggaccaccccgcgatcctgcccctcctggacctgcatgtcgtctccggggtcacgtgtctggtcctccccaagtaccaggccgacctgtatacctatctgagtaggcgcctgaacccgctgggacgcccgcagatcgcagcggtctcccggcagctcctaagcgccgttgactacattcaccgccagggcattatccaccgcgacattaagaccgaaaatatttttattaacacccccgaggacatttgcctgggggactttggtgccgcgtgcttcgtgcagggttcccgatcaagccccttcccctacggaatcgccggaaccatcgacaccaacgcccccgaggtcctggccggggatccgtataccaccaccgtcgacatttggagcgccggtctggtgatcttcgagactgccgtccacaacgcgtccttgttctcggccccccgcggccccaaaaggggcccgtgcgacagtcagatcacccgcatcatccgacaggcccaggtccacgttgacgagttttccccgcatccagaatcgcgcctcacctcgcgctaccgctcccgcgcggccgggaacaatcgcccgccgtacacccgaccggcctggacccgctactacaagatggacatagacgtcgaatatctggtttgcaaagccctcaccttcgacggcgcgcttcgccccagcgccgcagagctgctttgtttgccgctgtttcaacagaaatgaccgcccccagggggcggtgctgtttgcgggttggcacaaaaagaccccgacccgcgtctgtggtgtttttggcatcatgtcgccgggcgccatgcgtgccgttgttcccattatcccattccttttggttcttgtcggtgtatcgggggttcccaccaacgtctcctccaccacccaaccccaactccagaccaccggtcgtccctcgcatgaagcccccaacatgacccagaccggcaccaccgactctcccaccgccatcagccttaccacgcccgaccacacaccccccatgccaagtatcggactggaggaggaggaagaggaggagggggccggggacggcgaacatcttgaggggggagatgggacccgtgacaccctaccccagtccccgggcccagccttcccgttggctgaggacgtcgagaaggacaaacccaaccgtcccgtagtcccatcccccgatcccaacaactcccccgcgcgccccgagaccagtcgcccgaagacaccccccaccattatcgggccgctggcaactcgccccacgacccgactcacctcaaagggacgacccttggttccgacgcctcaacataccccgctgttctcgttcctcactgcctcccccgccctggacaccctcttcgtcgtcagcaccgtcatccacaccttatcgtttttgtgtattggtgcgatggcgacacacctgtgtggcggttggtccagacgcgggcgacgcacacaccctagcgtgcgttacgtgtgcctgccgtccgaacgcgggtagggtatggggcgggggatggggagagcccacacgcggaaagcaagaacaataaaggcggtggtatctagttgatatgcatctctgggtgtttttggggtgtggcggacgcggggcggtcattggacggggtgcagttaaatacatgcccgggacccatgaagcatgcgcgacttccgggcctcggaacccacccgaaacggccaacggacgtctgagccaggcctggctatccggagaaacagcacacgacttggcgttctgtgtgtcgcgatgtctctgcgcgcagtctggcatctggggcttttgggaagcctcgtgggggctgttcttgccgccacccatcggggacctgcggccaacacaacggaccccttaacgcacgccccagtgtcccctcaccccagccccctggggggctttgccgtccccctcgtagtcggtgggctgtgcgccgtagtcctgggggcggcgtgtctgcttgagctcctgcgtcgtacgtgccgcgggtgggggcgttaccatccctacatggacccagttgtcgtataatttcccccccccccccccttctccgcatgggtgatgtcgggtccaaactcccgacaccaccagctggtatggtataaatcaccggtgcgccccccaaaccatgtccggcagggggatgggggggcgaatgcggagggcacccaacaacaccgggctaaccaggaaatccgtggccccggcccccaataaagatcgcggtagcccggccgtgtgacactatcgtccataccgaccacaccgacgaatcccctaagggggaggggccattttacgaggaggaggggtataacaaagtctgtctttaaaaagcaggggttagggagttgttcggtcataagcttcagcgcgaacgaccaactaccccgatcatcagttatccttaaggtctcttttgtgtggtgcgttccggtatggggggggctgccgccaggttgggggccgtgattttgtttgtcgtcatagtgggcctccatggggtccgcggcaaatatgccttggcggatgcctctctcaagatggccgaccccaatcgctttcgcggcaaagaccttccggtcctggaccagctgaccgaccctccgggggtccggcgcgtgtaccacatccaggcgggcctaccggacccgttccagccccccagcctcccgatcacggtttactacgccgtgttggagcgcgcctgccgcagcgtgctcctaaacgcaccgtcggaggccccccagattgtccgcggggcctccgaagacgtccggaaacaaccctacaacctgaccatcgcttggtttcggatgggaggcaactgtgctatccccatcacggtcatggagtacaccgaatgctcctacaacaagtctctgggggcctgtcccatccgaacgcagccccgctggaactactatgacagcttcagcgccgtcagcgaggataacctggggttcctgatgcacgcccccgcgtttgagaccgccggcacgtacctgcggctcgtgaagataaacgactggacggagattacacagtttatcctggagcaccgagccaagggctcctgtaagtacgccctcccgctgcgcatccccccgtcagcctgcctgtccccccaggcctaccagcagggggtgacggtggacagcatcgggatgctgccccgcttcatccccgagaaccagcgcaccgtcgccgtatacagcttgaagatcgccgggtggcacgggcccaaggccccatacacgagcaccctgctgcccccggagctgtccgagacccccaacgccacgcagccagaactcgccccggaagaccccgaggattcggccctcttggaggaccccgtggggacggtggcgccgcaaatcccaccaaactggcacataccgtcgatccaggacgccgcgacgccttaccatcccccggccaccccgaacaacatgggcctgatcgccggcgcggtgggcggcagtctcctggcagccctggtcatttgcggaattgtgtactggatgcgccgccgcactcaaaaagccccaaagcgcatacgcctcccccacatccgggaagacgaccagccgtcctcgcaccagcccttgttttactagatacccccccttaatgggtgcgggggggtcaggtctgcggggttgggatgggaccttaactccatataaagcgagtctggaaggggggaaaggcggacagtcgataagtcggtagcgggggacgcgcacctgttccgcctgtcgcacccacagctttttttgcgaaccgtcccgttccgggatgccgtgccgcccgttgcagggcctggtgctcgtgggcctctgggtctgtgccaccagcctggttgtccgtggccccacggtcagtctggtatcaaactcatttgtggacgccggggccttggggcccgacggcgtagtggaggaagacctgcttattctcggggagcttcgctttgtgggggaccaggtcccccacaccacctactacgatggggtcgtagagctgtggcactaccccatgggacacaaatgcccacgggtcgtgcatgtcgtcacggtgaccgcgtgcccacgtcgccccgccgtggctttcgccctgtgtcgcgcaaccgacagcactcacagccccgcatatcccaccctggagctgaatctggcccaacagccgcttttgcgggtccggagggcgacgcgtgactatgccggggtgtacgtgttacgcgtatgggtcggggacgcaccaaacgccagcctgtttgtcctggggatggccatagccgccgaagggactctggcgtacaacggctcggcccatggctcctgcgacccgaaactgcttccgtattcggccccgcgtctggccccggcgagcgtataccaacccgcccctaacccggcctccaccccctcgaccaccacctccaccccctcgaccaccacctccaccccctcgaccaccatccccgctccccaagcatcgaccacacccttccccacgggagacccaaaaccccaacctcacggggtcaaccacgaacccccatcgaatgccacgcgagcgacccgcgactcgcgatacgcgctaacggtgacccagataatccagatagccatccccgcgtccattatagccctggtgtttctggggagctgtatttgctttatacacagatgtcaacgccgctaccgacgctcccgccgcccgatttacaacccccagatacccactggcatctcatgcgcggtgaacgaagcggccatggcccgcctcggagccgagctcaaatcgcatccgagcaccccccccaaatcccggcgccggtcgtcacgcacaccaatgccctccctgacggccatcgccgaagagtcggagcccgcgggggcggctgggcttccgacgccccccgtggaccccacgacatccaccccaacgcctcccctgttggtataggtccacggccactggccgggggcaccacataaccgaccgcagtcactgagttgggaataaaccggtattatttacctatatacgtgtatgtccatttcttcccccccccccccggaaaccaaagaaggaaacaaagaatggatgggaggagttcaggaagccggggagagggcccgcggcgcatttaaggcgttgttgtgttgactttggctcttctggcgggttggtgcggtgctgtttgttgggctcccattttacccgaagatcggctgctatccccgggacatggatcgcggggcggtggtggggtttcttctcggtgtttgtgttgtatcgtgcttggcgggaacgcccaaaacgtcctggagacgggtgagtgtcggcgaggacgtttcgttgcttccagctccggggcctacggggcgcggcccgacccagaaactactatgggccgtggaacccctggatgggtgcggccccttacacccgtcgtgggtctcgctgatgccccccaagcaggtgcccgagacggtcgtggatgcggcgtgcatgcgcgctccggtcccgctggcgatggcgtacgcccccccggccccatctgcgaccgggggtctacggacggacttcgtgtggcaggagcgcgcggccgtggttaaccggagtctggttatttacggggtccgagagacggacagcggcctgtataccctgtctgtgggcgacataaaggacccggctcgccaagtggcctcggtggtcctggtggtgcaaccggccccagttccgaccccacccccgaccccagccgattacgacgaggatgacaatgacgagggcgagggcgaggacgaaagtctagccggcactcccgccagcgggaccccccggctcccgcctccccccgcccccccgaggtcttggcccagcgcccccgaagtctcacacgtgcgtggggtgaccgtgcgtatggagactccggaagctatcctgttttcccccggggaggcgtttagcacgaacgtctccatccatgccatcgcccacgacgaccagacctacaccatggacgtcgtctggttgaggttcgacgtgccgacctcgtgtgccgagatgcgaatatacgaatcgtgtctgtatcacccgcagctcccagagtgtctgtccccggccgacgctccgtgcgccgcgagtacgtggacgtctcgcctggccgtccgcagctacgcggggtgttccagaacaaaccccccgccgcgctgttcggccgaggctcacatggagcccttcccggggctggcgtggcaggcggcctccgtcaatctggagttccgggacgcgtccccacaacactccggcctgtatctgtgcgtggtgtacgtcaacgaccatattcacgcatggggccacattaccatcagcaccgcggcgcagtaccggaacgcggtggtggaacagcccctcccacagcgcggcgcggatttggccgagcccacccacccgcacgtcggggcccctccccacgcgcccccaacccacggcgccctgcggttaggggcggtgatgggggccgccctgctgctgtctgcgctggggttgtcggtgtgggcgtgtatgacctgttggcgcaggcgtgcctggcgggcggttaaaagcagggcctcgggtaaggggcccacgtacattcgcgtggccgacagcgagctgtacgcggactggagctcggacagcgagggagaacgcgaccaggtcccgtggctggcccccccggagagacccgactctccctccaccaatggatccggctttgagatcttatcaccaacggctccgtctgtatacccccgtagcgatgggcatcaatctcgccgccagctcacaacctttggatccggaaggcccgatcgccgttactcccaggcctccgattcgtccgtcttctggtaaggcgccccatcccgaggccccacgtcggtcgccgaactgggcgaccgccggcgaggtggacgtcggagacgagctaatcgcgatttccgacgaacgcggacccccccgacatgaccgcccgcccctcgccacgtcgaccgcgccctcgccacacccgcgacccccgggctacacggccgttgtctccccgatggccctccaggctgtcgacgccccctccctgtttgtcgcctggctggccgctcggtggctccggggggcttccggcctgggggccgtcctgtgtgggattgcgtggtatgtgacgtcaattgcccgaggcgcataaagggccggtggtccgcctagccgcagcaaattaaaaatcgtgagtcactgcgaccgcaacttcccacccggagctttcttccggcctcgatgacgtcccggctctccgatcccaactcctcagcgcgatccgacatgtccgtgccgctttatcccacggcctcgccagtttcggtcgaagcctactactcggaaagcgaagacgaggcggccaacgacttcctcgtacgcatgggccgccaacagtcggtattaaggcgtcgacgcagacgcacccgctgcgtcggcatggtgatcgcctgtctcctcgtggccgttctgtcgggcggatttggggcgctcctgatgtggctgctccgctaaaagaccgcatcgacacgcgcgtccttcttgtcgtctctcttcccccccatcaccccgcaatttgcacccagcctttaactacattaaattgggttcgattggcaatgttgtctcccggttgatttttgggtgggtggggagtgggtgggtggggagtgggtgggtggggagtgggtgggtggggagtgggtgggtggggagtgggtgggtggggagtgggtgggtggggagtgggtgggtggggagtgggtgggtggggagtgggtgggtggggagtggcaaggaagaaacaagcccgaccaccagacagaaaatgtaaccatacccaaaccgactctgggggctgtttgtggggtcggaaccataggatgaacaaaccaccccgtacctcccgcacccttgggtgcgggtggctcatcggcatctgtccggtatgggttgttccccacccacttgcgttcggacgtcttagaatcatggcggttttctatgccgacatcggttttctcccccgcaataagacacgatgcgataaaatctgtttgtgaaatttattaagggtacaaattgccctagcacaggggtggggttagggccgggtccccacacccaaacgcaccaaacagatgcaggcagtgggtcgagtacagccccgcgtacgaacacgtcgatgcgtgtgtcagacagcaccagaaagcacaggccatcaacaggtcgtgcatatgtcggtgggtttggacgcggggggccatggtggtgataaagttaatggccgccgtccgccagggccacaggggcgacgtctcttggttggcccggagccactgggtgtggaccagccgcgcgtggcggcccaacatggcccctgtagccgggggcgggggatcgcgcacgtttgcagcgcacatgcgagacacctcgaccacggttcggaagaaggcccggtggtccgcgggcaacatcaccaggtgcgcaagcgcccgggcgtccagagggtagagccctgagtcatccgaggttggctcatcgcccgggtcatgccgcaagtgcgtgtgggttgggcttccggtgggcgggacgcgaaccgcggtgtggagccctacgcgggcccgagcgtacgctccatcttgtggggagaaggggtctgggctcgccaggggggcatacttgcccgggctatacagacccgcgagccgtacgtggttcgcggggggtgcgtggggtccggggctcccggggaggccggggctcccggggttgtcgtggatccctggggtcacgcggtaccctggggtctctgggagctcgcggtactctgggttccctaggttctcggggtggtcgcggaacccggggctcccggggaacacgcggtgtcctggggattgttggcggtcggacggcttcagatggcttcgagatcgtagtgtccgcaccgactcgtagtagacccgaatctccacattgccccgccgcttgatcattatcaccccgttgcgggggtccggagatcatgcgcgggtgtcctcgaggtgcgtgaacacctctggggtgcatgccggcggacggcacgccttttaagtaaacatctgggtcgcccggcccaactggggccgggggttgggtctggctcatctcgagagccacggggggaaccaccctccgcccagaaacttgggcgatggtcgtacccgggactcaacgggttaccggattacggggactgtcggtcacggtcccgccggttcttcgatgtgccacacccaaggatgcgttgggggcgattttgggcagcagcccgggagagcgcagcagaggacgctccgggtcgtgcacggcggttttggccgcctcccggtcctcacgcccccttttattgatctcatcgcgtacgtcggcgtacgtcctgggcccaacccgcatgttgtccaggaaggtgtccgccatttccagggcccacgacatgctcccccgcccgacgagcaggaagcggtccacgcaacggtcgccgccggtcgccccgacgagcaggaagcggtccacgcaacggtcgccgccggtcgcctcgacgaggacgttcctcctgcgggaaggcacgaacgcgggtgagccccctcctccgcccccgcgtcccccctcctccgcccccgcgtcccccctcctccgcccccgcgtcccccctcctccgcccccgcgtcccccctcctccgcccccgcgtcccccctcctccgcccccgcgtcccccctcctccacccccgcgtccccccctcctccgcccacccaaggtgcttacccgtgcacaaaggcggaccggtgggtttctgtcgtcggaggcccccggggtgcgtcccctgtgtttcgtgggtggggtgggtgggtctttccgcgtgtccctttccgatgcgatcccgatcccgagccggggcgtcgcgatgccgacgccgtccgctccgacggccctctgcgagtcccgctcccggtccgcgtgctccgcagccgctcccgtcgttcgtggccggcgccgtctgcgggcgtcggtcgcgccgggcctttatgtgcgccggagagacccgccccccgccgcccgggcccgcccccggggccggcgcggagtcgggcacggcgccagtgctcgcacttcgccctaataatatatatatattgggacgaagtgcgaacgcttcgcgttctcacttcttttacccggcggccccgcccccttggggcggtcccgcccgccggccaatgggggggcggcaaggcgggcggcccttgggccgcccgccgtcccgttggtcccaacgtccggcgggcgggaccgggggcccggggacggccaacgggcgcgcggggctcgtatctcattaccgccgaaccgggaagtcggggcccgggccccgcccccggcccgttcctcgttagcatgcggaacggaagcggaaaccaccggatcgggcggtaatgagatgccatgcggggcggggcgcgggcccacccgccctcgcgccccgcccatggcagatggcgcggatgggcggggccgggggttcgaccaacgggccgcggccacgggcccccggcgtgccggcgtcggggcggggtcgtgcataatggaattccgttcggggcgggcccgcctggggggcggggggccggcggcctccgctgctcctccttcccgccggcccctgggactatatgagcccgaggacgccccgatcgtccacacggagcgcggctgccgacacggatccacgacccgacgcgggaccgccagagacagaccgtcagacgctcgccgcgccgggacgccgatacgcggacgaagcgcgggagggggatcggccgtccctgtcctttttcccacccaagcatcgaccggtccgcgctagttccgcgtcgacggcgggggtcgtcggggtccgtgggtctcgccccctccccatcgagagtccgtaggtgacctaccgtgctacgtccgccgtcgcagccgtatccccggaggatcgccccgcatcggcgatggcgtcggagaacaagcagcgccccggctccccgggccccaccgacgggccgccgcccaccccgagcccagaccgcgacgagcggggggccctcgggtggggcgcggagacggaggagggcggggacgaccccgaccacgaccccgaccacccccacgacctcgacgacgcccggcgggacgggagggcccccgcggcgggcaccgacgccggcgaggacgccggggacgccgtctcgccgcgacagctggccctgctggcctccatggtagaggaggccgtccggacgatcccgacgcccgaccccgcggcctcgccgccccggacccccgcctttcgagccgacgacgatgacggggacgagtacgacgacgcagccgacgccgccggcgaccgggccccggcccggggccgcgcacgggaggccccgctacgcggcgcgtatccggaccccacggaccgcctgtcgccgcgcccgccggcccagccgccgcggagacgtcgtcacggccggcggcggccatcggcgtcatcgacctcgtcggactccgggtcctcgtcctcgtcgtccgcatcctcttcgtcctcgtcgtccgacgaggacgaggacgacgacggcaacgacgcggccgaccgcgcacgcgaggcgcgggccgtcgggcggggtccgtcgagcgcggcgccggaagcccccgggcggacgccgcccccgcccgggccaccccccctctccgaggccgcgcccaagccccgggcggcggcgaggacccccgcggcctccgcgggccgcatcgagcgccgccgggcccgcgcggcggtggccggccgcgacgccacgggccgcttcacggccgggcagccccggcgggtcgagctggacgccgacgcggcctccggcgccttctacgcgcgctatcgcgacgggtacgtcagcggggagccgtggcccggcgccgggcccccgcccccggggcgggtgctgtacggcggcctgggcgacagccgcccgggcctctggggggcgcccgaggcggaggaggcgcgacgccggttcgaggcctcgggcgccccggcggccgtgtgggcgcccgagctgggcgacgccgcgcagcagtacgccctgatcacgcggctgctgtacaccccggacgcggaggccatggggtggctccagaacccgcgcgtggtccccggggacgtggcgctggaccaggcctgcttccggatctcgggcgccgcgcgcaacagcagctccttcatcaccggcagcgtggcgcgggccgtgccccacctgggctacgccatggcggccggccgcttcggctggggcctggcgcacgcggcggccgccgtggccatgagccgccgatacgaccgcgcgcagaagggcttcctgctgaccagcctgcgccgcgcctacgcgcccctgttggcgcgcgagaacgcggcgctgacgggggccgcggggagccccggcgccggcgcagatgacgagggggtcgccgccgccgtcgtcgccgccgccgccgcaccgggcgagcgcgcggtgcccgccgggtacggcgccgcggggatcctcgccgccctggggcggctgtccgccgcgcccgcctcccccgcggggggcgacgaccccgacgccgcccgccacgccgacgccgacgacgacgccgggcgccgcgcccaggccggccgcgtggccgtggagtgcctggccgcctgccgcgggatcctggaggcgctggccgagggcttcgacggcgacctggcggccgtcccggggctggccggggcccggcccgccagccccccgcggccggagggacccgcgggccccgcttccccgccgccgccgcacgccgacgcgccccgcctgcgcgcgtggctgcgcgagctgcggttcgtgcgcgacgcgctggtgctcatgcgcctgcgcggggacctgcgcgtggccggcggcagcgaggccgccgtggccgccgtgcgcgccgtgagcctggtcgccggggccctgggccccgcgctgccgcgggacccgcgcctgccgagctccgcggccgccgccgccgcggacctgctgtttgagaaccagagcctgcgccccctgctggcggcggccgccagcgcaccggacgccgccgacgcgctggcggccgccgccgcctccgccgcgccgcgggaggggcgcaagcgcaagagtcccggcccggcccggccgcccggaggcggcggcccgcgacccccgaagacgaagaagagcggcgcggacgcccccggctcggacgcccgcgcccccctccccgcgcccccctccacgcccccggggcccgagcccgcccccgcccagcccgcggcgccccgggccgccgcggcgcaggcccgcccgcgccccgtggcgctgtcgcgccggcccgccgagggccccgaccccctgggcggctggcggcggcagcccccggggcccagccacacggcggcgcccgcggccgccgccctggaggcctactgctccccgcgcgccgtggccgagctcacggaccacccgctgttccccgtcccctggcgaccggccctcatgtttgacccgcgggccctggcctcgatcgccgcgcggtgcgccgggcccgccgccgccgcccaggccgcgtgcggcggcggcgacgacgacgataacccccacccccacggggccgccgggggccgcctctttggccccctgcgcgcctcgggcccgctgcgccgcatggcggcctggatgcgccagatccccgaccccgaggacgtgcgcgtggtggtgctgtactcgccgctgccgggcgaggacctggccggcggcggggcctcgggggggccgccggagtggtccgccgagcgcggcgggctgtcctgcctgctggcggccctggccaaccggctgtgcgggccggacacggccgcctgggcgggcaactggaccggcgcccccgacgtgtcggcgctgggcgcgcagggcgtgctgctgctgtccacgcgggacctggccttcgccggggccgtggagtttctggggctgctcgccagcgccggcgaccggcggctcatcgtggtcaacaccgtgcgcgcctgcgactggcccgccgacgggcccgcggtgtcgcggcagcacgcctacctggcgtgcgacctgctgcccgccgtgcagtgcgccgtgcgctggccggcggcgcgggacctgcgccgcacggtgctggccccgggccgcgtgttcggcccgggggtcttcgcgcgcgtggaggccgcgcacgcgcgcctgtaccccgacgcgccgccgctgcgcctgtgccgcggcggcaacgtgcgctaccgcgtgcgcacgcgcttcggcccggacacgccggtgcccatgtccccgcgcgagtaccgccgggccgtgctgccggcgctggacggccgggcggcggcctcggggaccaccgacgccatggcgcccggcgcgccggacttctgcgaggaggaggcccactcgcaccgcgcctgcgcgcgctggggcctgggcgcgccgctgcggcccgtgtacgtggcgctggggcgcgaggcggtgcgcgccggcccggcccggtggcgcgggccgcggagggacttttgcgcccgcgccctgctggagcccgacgacgacgcccccccgctggtgctgcgcggcggcgacgacgacgacgacggcccgggggccctgccgccggcgttgcccgggattcgctgggcctcggccacgggccgcagcggcaccgtgctggcggcggcgggggccgtggaggtgctgggggcggaggcgggcttggccacgcccccgcgacgggaagttgtggactgggaaggcgcctgggacgacgacgacggcggcgcgttcgagggggacggggtgctgtaacgggccgggacggggcggggcgcttgcgaaacccgaagacgcaataaacgacaacgacctgatttagttttgcagtagcgttgtttatttcgaggggcgggagggggcgaggggcgggagggggcgaggggcgggagggggcgaggggcgggagggggcgaggggcgggagggggcgaggggcgggagggggcgaggggcgggagggggcgaggggcgggagggggcgaggggcgggagggggcgaggggcgggagggggcgaggggcgggagggggcgaggggcgggagggggcgaggggcgggagggggcgaggggcgggagggggcgaggggcgggagggggcgaggggcgggagggggcgaggggcgggagggggcgaggggcgggagggggcgaggggcgggagggggcgaggggcggtggtggtgcgcgggcgcccccggagggtttggatctctgacctgagattggcggcactgaggtagagatgcccgaacccccccgagggagcgcgggacgcggccggggagggctggggccggggagggctggggccggggagggctggggccggggagggctggggccggggagggctggggccggggagggctggggccggggagggctggggctggggagggctggggctggggagggctggggcggtggtgtgtgacaggagcggcgtgttgcgctgggggacgtctggaggagcggggggtgcgcggtgacgtgtggatgaggaacaggagttgttgcgcggtgagttgtcgctgtgagttgtgttggtgggcaggtgtggtggatgacgtgacgtgtgacgtgtggatgaggaaccggagtcgccggtgcgccgtgctgttggtgttctgttggtgttgttacacctgtggcagcccgggccccccgcgggcggggcggcgcgcaaaaaaggcgggcggcggtccgggcggcgtgcgcgcgcgcggcgggcgttgggggagcggggggaggagcggggggaggagcggggggaggagcggggggaggagcggggggaggagcggggggaggagcggggggaggagcggggggaggagcggggggaggagcggggggaggagcggggggaggagcggggggaggagcggggggaggagcggggggaggagcggggggaggagcggggggaggagcggggggaggagcggggggaggagcggaaaacgggccccccccgaaacacaccccccgggggtcgcgcgcggccctttaaagcg

SEQ ID NO: 9 - DNA, 159285 bp, Artificial Sequence
  C174 from HSV-C134 Complete Viral Genome v1 Chimeric HSV expressing EphA2-Endo-ML
agcccgggccccccgcgggcggggcggcgcgcaaaaaaggcgggcggcggtccgggcggcgtgcgcgcgcgcggcgggcgttggggagcggggggaggagcggggggaggagcggggggaggagcggggggaggagcggggggaggagcggggggaggagcggggggaggagcggggggaggagcggggggaggagcggggggaggagcggggggaggagcggggggaggagcggggggaggagcggggggaggagcggggggaggagcggggggaggagcggggggaggagcggggggaggagcggaaaacgggccccccccgaaacacaccccccgggggtcgcgcgcggccctttaaagcgcggcggcgcagcccgggccccccgcggccgagacgagcgagttagacaggcaagcactactcgcctctgcacgcacatgcttgcctgtcaaactctaccaccccggcacgctctctgtctccatggcccgccgccgccgccatcgcggcccccgccgcccccggccgcccgggcccacgggcgccgtcccaaccgcacagtcccaggtaaccgcctatgggaatgaaagaccccacctgtaggtttggcaagctaggatcaaggtcaggaacagagaaacaggagaatatgggccaaacaggatatctgtggtaagcagttcctgccccgctcagggccaagaacagttggaacaggagaatatgggccaaacaggatatctgtggtaagcagttcctgccccgctcagggccaagaacagatggtccccagatgcggtcccgccctcagcagtttctagagaaccatcagatgtttccagggtgccccaaggacctgaaatgaccctgtgccttatttgaactaaccaatcagttcgcttctcgcttctgttcgcgcgcttctgctccccgagctctatataagcagagctggtttagtgaaccgtcagatcgcctggagacgccatccacgctgttttgacctccatagaagacaccgactctagctagaggatctcctaggaagctggccgcacaaagtggtaccggatcccgggtcgaccatggagctccgggcagtcggtttctgcctggcgctgctgtggggttgcgcgctggcggccgcggcggcacagggaaaggaagttgtccgtttttccaagtcagaacaactaaagcccctgaagacctatgtggatcctcacacttacgaagaccccaaccaggctgtactcaagtttaccaccgagatccacccatcctgtgtggcaaggcagaaggtcattggagcaggagagtttggagaggtctataaagggacgctgaaggcatcctcggggaagaaggagataccggtggccatcaagacactgaaagcgggctacactgagaagcagcgggtggacttcctgagcgaggccagcatcatgggccagtttagccaccacaatatcatccgcctggagggcgtggtctctaaatacaaacccatgatgattatcacagagtacatggagaatggagcgctagacaagttccttagggagaaggatggtgagttcagtgtacttcagttggtgggcatgctgaggggtatcgcatccggcatgaagtacctggccaacatgaactacgtgcaccgggacctggccgcccgcaacatcctcgtcaacagcaacctggtgtgcaaggtgtccgattttggcctgtcgcgtgtgctggaagatgaccccgaggccacctacaccacaagtggcggcaagatccctattcgatggacagccccagaggccatttcctaccgcaagttcacctcagccagcgatgtgtggagctacggcattgtcatgtgggaagtgatgacttatggcgaacggccctactgggaactgtcaaaccacgaggtcatgaaagccatcaacgacggcttccggctccctacgcccatggactgcccttcagccatttaccagctcatgatgcagtgctggcagcaagagcgctcccgccgacccaagtttgccgacatcgttagcatcctggacaagctcatccgagcccccgactccctcaagacgctggctgactttgatccccgagtgtccatccggctgcccagcaccagcggctcggagggagtccccttccgtacggtgtccgagtggctggagagcatcaagatgcaacagtacacggaacacttcatggtggctggctacacggccatcgagaaggtggtacagatgtccaacgaagacatcaaaaggatcggagtgcgtcttcctggccaccagaagcgtattgcctacagcctgctgggactcaaggaccaggtcaacacagtggggattcctatcgggaattcagaacaaaaactcatctcagaagaagatctaggaggcggcgggtcaggtggaggtggctctggcggtggcggttaaaattccgactcactatagggcgaattaattccggagatctctagatccggagagacgatggcaggagccgcgcatatatacgcttggagccagcccgccctcacagggcgggccgcctcgggggcgggactggccaatcggcggccgccagcgcggcggggcccggccaaccagcgtccgccgagtcttcggggcccggcccattgggcgggagttaccgcccaatgggccgggccgcccacttcccggtatggtaattaaaaacttgcaagaggccttgttccgcttcccggtatggtaattagaaactcattaatgggcggccccggccgcccttcccgcttccggcaattcccgcggcccttaatgggcaaccccggtattccccgcctcccgcgccgcgcgtaaccactcccctggggttccgggttatgctaattgcttttttggcggaacacacggcccctcgcgcattggcccgcgggtcgctcaatgaacccgcattggtcccctggggttccgggtatggtaatgagtttcttcgggaaggcgggaagccccggggcaccgacgcaggccaagcccctgttgcgtcggtgggaggggcatgctaatggggttctttgggggacaccgggttggtcccccaaatcgggggccgggccgtgcatgctaatgatattctttgggggcgccgggttggtccccggggacggggccgccccgcggtgggcctgcctcccctgggacgcgcggccattgggggaatcgtcactgccgcccctttggggaggggaaaggcgtggggtataagttagccctggcccgacagtctggtcgcatttgcacctcggcactcggagcgagacgcagcagccaggcagactcgggccgccccctctccgcatcaccacagaagccccgcctacgttgcgacccccagggaccctccgtccgcgaccctccaaccgcatacgacccccatggagccccgccccggagcgagtacccgccggcctgagggccgcccccagcgcgaggtgaggggccgggcgccatgtctggggcgccatattggggggcgccatattggggggcgccatgttgggggacccccgacccttacactggaaccggccgccatgttgggggacccccactcatacacgggagccgggcgccatgttagggggcgtggaaccccgtgacactatatatacagggaccgggggcgccatgttagggggcgcggaaccccctgaccctatatatacagggaccggggtcgccctgttgggggtcgccatgtgaccccctgactttatatatacagaccccccaacacatacacatggcccctttgactcagacgcagggcccggggtcgccgtgggaccccctgactcatacacagagacacgcccccacaacaaacacacagggaccggggtcgccgtgttagggggcgtggtccccactgactcatacgcagggcccccttactcacacgcatctaggggggtggggaggagccgcccgccatatttgggggacgccgtgggacccccgactccggtgcgtctggagggcgggagaagagggaagaagaggggtcgggatccaaaggacggacccagaccacctttggttgcagacccctttctcccccctcttccgaggccagcaggggggcaggactttgtgaggcggggggggggagagggggaactcgtgggcgctgattgacgcgggaaatccccccattcttacccgcccccctttttttccccttagcccgccccggatgtctgggtgtttccctgcgaccgagacctgccggacagcagcgactctgaggcggagaccgaagtgggggggcggggggacgccgaccaccatgacgacgactccgcctccgaggcggacagcacggacacggaactgttcgagacggggctgctggggccgcagggcgtggatgggggggcggtctcgggggggagccccccccgcgaggaagaccccggcagttgcgggggcgccccccctcgagaggacggggggagcgacgagggcgacgtgtgcgccgtgtgcacggatgagatcgcgccccacctgcgctgcgacaccttcccgtgcatgcaccgcttctgcatcccgtgcatgaaaacctggatgcaattgcgcaacacctgcccgctgtgcaacgccaagctggtgtacctgatagtgggcgtgacgcccagcgggtcgttcagcaccatcccgatcgtgaacgacccccagacccgcatggaggccgaggaggccgtcagggcgggcacggccgtggactttatctggacgggcaatcagcggttcgccccgcggtacctgaccctgggggggcacacggtgagggccctgtcgcccacccaccctgagcccaccacggacgaggatgacgacgacctggacgacggtgaggcgggggggcggcgaggaccctgggggaggaggaggaggaggggggagggaggaataggcgggcgggggggcgaggaaagggcgggcgcggaaagggagggcctgggagggggcgtaacctgatcgcgccccccgttgtctcttgcagcagactacgtaccgcccgccccccgccggacgccccgcgcccccccacgcagaggcgccgccgcgccccccgtgacgggcggggcgtctcacgcagccccccagccggccgcggctcggacagcgcccccctcggcgcccatcgggccacacggcagcagtaacaccaacaccaccaccaacagcagcggcggcggcggcggctcccgccagtcgcgagccgcggcgccgcggggggcgtctggcccctccgggggggttggggttggggttggggttgttgaagcggaggcggggcggccgaggggccggacgggcccccttgtcaacagacccgccccccttgcaaacaacagagaccccatagtgatcagcgactcccccccggcctctccccacaggccccccgcggcgcccatgccaggctccgccccccgccccgggcccaccgcgtcctcggccgcgtcgggacccgcgcgcccccgcgcggccgtggccccgtgcgtgcgagcgccgcctccggggcccggcccccgcgccccggcccccgcggacgcgcgccgtgtgccccagtcgcactcgtccctggctcaggccgcgaaccaagaacagagtctgtgccgggcgcgtgcgacggtggcgcgcggctcgggggggccgggcgtggagggtggacacgggccctcccgcggcgccgccccctccggcgcccccccgctcccctccgccgcctctgtcgagcaggaggcggcggtgcgtccgaggaagaggcgcgggtcgggccaggaaaacccctccccccagtccacgcgtccccccctcgcgccggcaggggccaagagggcggcgacgcaccccccctccgactcagggccgggggggcgcggccagggtgggcccgggacccccctgacgtcctcggcggcctccgcctcttcctcctctgcctcttcctcctcggccccgactcccgcgggggccgcctcttccgccgccggggccgcgtcctcctccgcttccgcctcctcgggcggggccgtcggtgccctgggagggagacaagaggaaacctccctcggcccccgcgctgcttctgggccgcgggggccgaggaagtgtgcccggaagacgcgccacgcggagacttccggggccgcccccgcgggcggcctcacgcgctacctgcccatctcgggggtctctagcgtggtcgccctgtcgccttacgtgaacaagacgatcacgggggactgcctgcccatcctggacatggagacggggaacatcggggcgtacgtggtcctggtggaccagacgggaaacatggcgacccggctgcgggccgcggtccccggctggagccgccgcaccctgctccccgagaccgcgggtaaccacgtgatgccccccgagtacccgacggcccccgcgtcggagtggaacagcctctggatgacccccgtggggaacatgctgttcgaccagggcaccctagtgggcgccctggacttccgcagcctgcggtctcggcacccgtggtccggggagcagggggcgtcgacccgggacgagggaaaacaataagggacgccccccgtgtttgtggggaggggggggtcgggcgctgggtggtctctggccgcgcccactacaccagccaatccgtgtcggggaggggaaaagtgaaagacacgggcaccacacaccagcgggtctttagtgttggccctaataaaaaactcaggggatttttgctgtctattgggaaataaaggtttacttttgtatcttttccctgtctgtgttggatggatctcgggggtgcgtgggagtgggggtgcgtgggagtgggggtgcgtgggagtgggggtgcgtgggagtgggggtgcgtgggagtgggggtgcgtgggagtgggggtgcgtgggagtgggggtgcgtgggagtgggggtgcgtgggagtgggggtgccatgttgggcaggctctggtgttaaccacagagccgcggcccgggctgcctgaccaccgatccccgaaagcatcctgccactggcatggagccagaaccacagtgggttgggtgtgggtgttaagtttccgcgagcgcctgcccgcccggactgacctggcctctggccgccacaaagggcgggggggggttaactacactatagggcaacaaaggacgggaggggtggcggggcgggacggggcgcccaaaagggggtcggccacaccacagacgtgggtgttggggggtggggcggaggggtggggggggagacagaaacaggaacatagttagaaaacaagaatgcggtgcagccagagaatcacaggagacgaggggatgggcgtgttggttaccaacccacacccaggcatgctcggtggtatgaaggagggggggcggtgcttcttagagaccgccgggggacgtggggttggtgtgcagaggcacgcgcacccgcgtcggccaggtgggccggtaccccatcccccctcccccgacccttcccacccccgcgtgccagagatcaccccggtcccccggcacccgccactcctccatatcctcgctttaggaacaactttagggggggtacacacgcgccgtgcatttccttccacaccccccctcccccgcactcccccccccccggcagtaagacccaagcatagagagccaggcacaaaaacacaggcggggtgggacacatgccttcttggagtacgtgggtcattggcgtggggggttacagcgacaccggccgaccccctggcggtcttccagccggcccttagataagggggcagttggtggtcggacgggtaagtaacagagtctgactaagggtgggagggggggaaaagaacgggctggtgtgctgtaacacgagcccacccgcgagtggcgtggccgaccttagcctctggggcgccccctgtcgtttgggtcccccccctctattggggagaagcaggtgtctaacctacctggaaacgcggcgtctttgttgaaccacaccggggcgcccttgacgagtgggataacgggggaggaagggagggaggagggtactgggggtgaagaaggggggggggggagaagcgagaacaggaaaggcgacggagcccgacaaaacaccgagaaaaaaaaaccacagcgcatgcgccgggccgttgtggggccccgggccggggccccttgggtccgccggggccccgggccgggccgccacgggggccggccgttggcggtaaccccgattgtttatctcaggccccgggccgggaacccggaaaagcctccggggggcctttttcgcgtcgcgtgccggcgagcgggcccggacggggcccggaccgccgcggtcgggggccccctcgtcccgggccgtacgcggccttcgccccgtgaggggacagacgaacgaaacattccggcgacggaacgaaaaacaccccagacgggttaaagaaacagaaaccgcaaccccccccacccccgaaacggggaaaacaaaaaacagaccagcggccggccggcgcttagggggaggatgtcgccgacgccccttggccgccccggctgcaggggggcccggagagccgcggcacccggacgcgcccggaaagtctttcgcaccacccgcgatcggcacggccgcgcccccgcttttataaaggctcagatgacgcagcaaaaacaggccacagcaccacgtgggtaggtgatgtaattttattttcctcgtctgcggcctaatggatttccgggcgcggtgcccctgtctgcagagcacttaacggattgatatctcgcgggcacgcgcgcccttaatggaccggcgcggggcggggggccggatacccacacgggcgggggggggggtgtcgcgggccgtctgctggcccgcggccacataaacaatgactctgggcctttctgcctctgccgcttgtgtgtgcgcgcgccggctctgcggtgtcggcggcggctgcggcggctgcggcggccgccgtgttcggtctcggtagccggccggcgggtggactcgcggggggccggagggtggaaggcaggggggtgtaggatgggtatcaggacttccacttcccgtccttccatcccccgttcccctcggttgttcctcgcccccccccacaccccgccgctttccgttggggttgttattgttgtcgggatcgtgcgggccgggggtcgccggggcaggggcgggggcgggggtgctcgtcgatcgaccgggctcagtgggggcgtggggtgggggggaaaaggcgaagagactgggggtgggggggggtgtcgggggtggctgtttttttttgtgggtgttttttgtggctgttcccgtcccccgtcacccccctccctccgtccccccgtcgcgggtgtttgtgtttgtttattccgacatcggtttatttaaataaacacagccgttctgcgtgtctgttcttgcgtgtggctgggggcttatatgtggggtcccgggggcgggatggggtttagcggcggggggcggcgcgccggacggggcgctggagataacggcccccggggaacgggggaccggggctgggtctcccgaggtgggtgggtgggcggcggtggccgggccgggccgggccgggtgggcggggtttggaaaaacgaggaggaggaggaggagaaggagggggggggagacggggggaaagcaaggacacggcccggggggtgggagcgcgggccgggccgctcgtaagagccgcgacccggccgccggggagcgttgtcgccgtcggtctgccggcccccgtccctcccttttttgaccaaccagcgcccccccccctcaccaccattcctaccaccaccaccaccaccgacacctcccgcacacccccgcccacactccccccccccacccaacccgcaccacgagcacgggttgggggtagcaggggatcaaaggggggcaaggccggcggggcggttcgggggcgggggcgggagaccgagtaggccccgcccatccgcggcccctcccggcagccacgccccccagcgtcgggtgtcacggggaaagagcagggggagaggggagagggggggagaggggagagggggggagaggggagagggggggagaggggagagggggggagaggggagagggggggagaggggagagggggggagaggggagagggggggagaggggagagggggggagaggggagagggggggagaggggagagggggggagagggggtatataaaccaacgaaaagcgcgggaacggggatacggggcttgtgtggcacgacgtcgtggttgtgttactgggcaaacacttggggactgtaggtttctgtgggtgccgaccctaggcgctatggggattttgggttgggtcgggcttattgccgttggggttttgtgtgtgcgggggggcttgtcttcaaccgaatatgttattcggagtcgggtggctcgagaggtgggggatatattaaaggtgccttgtgtgccgctcccgtctgacgatcttgattggcgttacgagaccccctcggctataaactatgctttgatagacggtatatttttgcgttatcactgtcccggattggacacggtcttgtgggataggcatgcccagaaggcatattgggttaacccctttttatttgtggcgggttttttggaggacttgagtcaccccgcatttcctgccaacacccaggaaacagaaacgcgcttggccctttataaagagatacgccaggcgctggacagtcgcaagcaggccgccagccacacacctgtgaaggctgggtgtgtgaactttgactattcgcgcacccgccgctgtgtagggcgacaggatttgggacctaccaacggaacgtctggacggaccccggttctgccgccggacgatgaagcgggcctgcagccgaagcccctcaccacgccgccgcccatcatcgccacgttggaccccaccccgcgacgggacgccgccgcaaaaagcagacgccgacgaccccactcccggcgcatctaatgatgccgcgacggaaacccgtccgggttcggggggcgaaccggccgcctgtcgctcgtcagggccggcgggcgctcctcgccgccctagaggctgtcccgctggtgtgacgttttcctcgtccgcgccccccgaccctcccatggatttaacaaacgggggggtgtcgcctgtggcgacctcggcgcctctggactggaccacgtttcggcgtgtgtttctgatcgacgacgcgtggcggcccctgttggagcctgagctggcgaaccccttaaccgcccacctcctgaccgaatataatcgtcggtgccagaccgaagaggtgctgccgccgcgggaggatgtgttttcgtggactcgttattgcacccccgacgaggtgcgcgtggttatcatcggccaggacccatatcaccaccccggccaggcgcacggacttgcgtttagcgtgcgcgcgaacgtgccgcctcccccgagtcttcggaatgtcttggcggccgtcaagaactgttatcccgaggcacggatgagcggccacggttgcctggaaaagtgggcgcgggacggcgtcctgttactaaacacgaccctgaccgtcaagcgcggggcggcggcgtcccactctagaatcggttgggaccgcttcgtgggcggagttatccgccggttggccgcgcgccgccccggcctggtgtttatgctctggggcgcacatgcccagaatgccatcaggccggaccctcgggtccattgcgtcctcaagttttcgcacccgtcgcccctctccaaggttccgttcggaacatgccagcatttcctcgtggcgaatcgatatctcgagacccggtcgatttcacccatcgactggtcggtttgaaaggcatcgacgtccggggttttcgtctgtgggggcttttgggtatttccgatgaataaagacggttaatggttaaacctctggtctcatacgggtcggtgatgtcgggcgtcgggggagagggagttccctctgcgcttgcgattctagcctcgtggggctggacgttcgacacgccaaaccacgagtcagggatatcgccagatacgactcccgcagattccattcggggggccgctgtggcctcacctgaccaacctttacacgggggcccggaacgggaggccacagcgccgtctttctccccaacgcgcgcggatgacggcccgccctgtaccgacgggccctacgtgacgtttgataccctgtttatggtgtcgtcgatcgacgaattagggcgtcgccagctcacggacaccatccgcaaggacctgcggttgtcgctggccaagtttagcattgcgtgcaccaagacctcctcgttttcgggaaacgccccgcgccaccacagacgcggggcgttccagcgcggcacgcgggcgccgcgcagcaacaaaagccttcagatgtttgtgttgtgcaaacgcacccacgccgctcgagtgcgagagcagcttcgggtcgttattcagtcccgcaagccgcgcaagtattacacgcgatcttcggacgggcggctctgccccgccgtccccgtgttcgtccacgagttcgtctcgtccgagccaatgcgcctccaccgagataacgtcatgctggcctcgggggccgagtaaccgcccccccgcgccaccctcactgcccgtcgcgcgtgtttgatgttaataaataacgcataaattatcttaatagatctcccgatcccctatggtgcactctcagtacaatctgctctgatgccgcatagttaagccagtatctgctccctgcttgtgtgttggaggtcgctgagtagtgcgcgagcaaaatttaagctacaacaaggcaaggcttgaccgacaattgcatgaagaatctgcttagggttaggcgttttgcgctgcttcgcgatgtacgggccagatatacgcgttgacattgattattgactagttattaatagtaatcaattacggggtcattagttcatagcccatatatggagttccacgttacataacttacggtaaatggcccgcctggctgaccgcccaacgacccccgcccattgacgtcaataatgacgtatgttcccatagtaacgccaatagggactttccattgacgtcaatgggtggagtatttacggtaaactgcccacttggcagtacatcaagtgtatcatatgccaagtacgccccctattgacgtcaatgacggtaaatggcccgcctggcattatgcccagtacatgaccttatgggactttcctacttggcagtacatctacgtattagtcatcgctattaccatggtgatgcggttttggcagtacatcaatgggcgtggatagcggtttgactcacggggatttccaagtctccaccccattgacgtcaatgggagtttgttttggcaccaaaatcaacgggactttccaaaatgtcgtaacaactccgccccattgacgcaaatgggcggtaggcgtgtacggtgggaggtctatataagcagagctctctggctaactagagaacccactgcttactggcttatcgaaattaatacgactcactatagggagacccaagctggctagttaagcttggtaccgagctcggatccactagtccagtgtggtggaattgcccttggatcctcaatggcccagcgcaacggcatgtcgccgcgccccccgcccctcggtcgcggccgcggggccggagggccttcgggggttggttcctctcctccttcttcttgtgtgccgatgggagcgccgtccacagcgggcactggtgcgagtgctgcggctacgacgacgccgggccacggcgtccaccgggtagaaccccgcgggccgccgggcgcccctccgagtagcgacaacaatggcaacttttggcacggcccggagcgcctgttgctgtctcagattccggtggagcgccaggcgctgacggagctggaataccaggccatgggcgccgtgtggcgcgcggcgtttttggccaacagcacgggccgcgccatgcgcaagtggtcgcagcgcgacgcgggcacgctgctgccgctcggacggccgtacggattctacgcgcgggtgacgccgcgcagccagatgaacggcgtgggcgcgacggacctgcgtcaactgtcgccgcgggacgcgtggatcgtactggtggctaccgtggtgcacgaggtggaccccgcagccgacccgacgttgggcgacaaggccggccatcccgagggtctgtgcgcgcaggacggactgtacctggcgctgggcgccgggttccgcgtgttcgtgtacgacctggcaaacaacacgctgatcctagcggcgcgcgacgcggacgagtggtttcggcacggcgcgggcgaggtggtgcggctgtaccgctgcaaccggctgggcgtgggcaccccgcgcgcgacgctgctgcctcagccggcgctccgacagacgttgctgcgcgccgaggaggcgacggcgctcggacgggagctgcgccggcggtgggccggcacgacggtggcgctgcagacgccgggcaggcgactgcagccgatggtactgctgggcgcgtggcaggagctggcgcagtacgagccgttcgcgtcggcgccgcaccccgcgtcgctgctgacggccgtgcgtcggcacctgaaccagcgtctgtgctgcggctggctggcgctgggcgcggtgctgcccgcgcggtggctgggctgcgcggcggggccggcgacggggacggcggcggggacgacgtcgccgccagcggcgagcggcacggagacggaggccgccggcggggacgcgccgtgcgcgatagcgggagccgtggggtccgctgtacctgtgcctccgcagccgtacggcgccgccggcgggggcgcgatttgcgtgcctaacgcggacgcgcacgcggtggtcggggcggacgcggcagcagcagcggcgccgacggtgatggtgggttcgacagcgatggcgggtccggcggcgtcggggaccgtgccgcgcgccatgctggtggtgctgctggacgagctgggcgccgtgttcgggtactgcccgctggacgggcacgtgtacccgctggcggcggagctgtcgcactttctgcgcgcgggcgtgctgggcgcgctggcgctgggacgcgagtcggcgcccgccgccgaggccgcgcggcggctgctgcccgagctggaccgcgagcagtgggagcggccgcgctgggacgcgctgcacctgcacccgcgcgccgcgctgtgggcgcgcgagccgcacgggcagtgggagttcatgtttcgcgaacaacgcggtgaccccataaatgatcccctcgcatttcgtctttcggacgctcgaactctcggtctcgacctcaccaccgtcatgacagagcgtcaaagtcaattgcccgaaaagtatatcggtttctatcagattaggaaacctccttggctcatggaacaacctccacccccatctcgccaaaccaaaccggacgctgcaacgatgcccccaccgctcagtgctcaggcaagcgtcagctacgcgctccgatacgatgacgagtcctggcgcccgctcagcacagttgacgaccacaaagcctggttggatctcgacgaatcacattgggtcctcggggacagccgacccgacgatataaaacaacgcagactgctgaaggccactcaacgacgaggcgccgaaatcgacagacccatgcctgtcgtgcctgaagaatgttacgaccaacgcttcactaccgaaggccaccaggtcatcccgttgtgcgcgtccgaacccgaggatgacgacgaagatcctacctacgacgaattgccgtcgcgcccaccccagaaacataagccgccagacaaacctccgcgcttatgcaaaacgggccccggcccacctccgctgccgccaaagcaacggcacggttccaccgacggaaaagtttctgcgccccgacagtcggagcatcataaaagacagacccgaccgccaaggccgccaccgcccaaattcggggatagaaccgcggcccatctctcgcaaaatatgcgggacatgtacctcgatatgtgtacatcttcgggccacaggccacggccgccagcacctccgcggccgaaaaaatgtcaaacacacgcccctcaccacgttcatcataagcttaagggcaattctgcagatatccagcacagtggcggccgctcgagtctagagggcccgcggttcgaaggtaagcctatccctaaccctctcctcggtctcgattctacgcgtaccggtcatcatcaccatcaccattgagtttaaacccgctgatcagcctcgactgtgccttctagttgccagccatctgttgtttgcccctcccccgtgccttccttgaccctggaaggtgccactcccactgtcctttcctaataaaatgaggaaattgcatcgcattgtctgagtaggtgtcattctattctggggggtggggtggggcaggacagcaagggggaggattgggaagacaatagcaggcatgctggggatgcggtgggctctatggcttctgaggcggaaagaaccagctggggctctagggggtatccccacgcgccctgtagcggcgcattaagcgcggcgggtgtggtggttacgcgcagcgtgaccgctacacttgccagcgccctagcgcccgctcctttcgctttcttcccttcctttctcgccacgttcgccggctttccccgtcaagctctaaatcgggggctccctttagggttccgatttagtgctttacggcacctcgaccccaaaaaacttgattagggtgatggttcacgtagtgggccatcgccctgatagacggtttttcgccctttgacgttggagtccacgttctttaatagtggactcttgttccaaactggaacaacactcaaccctatctcggtctattcttttgatttataagggattttgccgatttcggcctattggttaaaaaatgagctgatttaacaaaaatttaacgcgaattaattctgtggaatgtgtgtcagttagggtgtggaaagtccccaggctccccagcaggcagaagtatgcaaagcatgcatctcaattagtcagcaaccaggtgtggaaagtccccaggctccccagcaggcagaagtatgcaaagcatgcatctcaattagtcagcaaccatagtcccgcccctaactccgcccatcccgcccctaactccgcccagttccgcccattctccgccccatggctgactaattttttttatttatgcagaggccgaggccgcctctgcctctgagctattccagaagtagtgaggaggcttttttggaggcctagtattaaggaatttggctggttgtttgttgtctttaatggaccgcccgcagggggggtggcatttcagtgtcgggtgacgagcgcgatccggccgggatcctaggaccccaaaagtttgtctgcgtattccagggcggggctcagttgaatctcccgcagcacctctaccagcaggtccgcggtgggctggagaaactcggccgtcccggggcaggcggtcgtcgggggtggaggcgcggcgcccaccccgtgtgccgcgcctggcgtctcctctgggggcgacccgtaaatggttgcagtgatgtaaatggtgtccgcggtccagaccacggtcaaaatgccggccgtggcgctccgggcgctttcgccgcgcgaggagctgacccaggagtcgaacggatacgcgtacatatgggcgtcccacccgcgttcgagcttctggttgctgtcccggcctataaagcggtaggcacaaaattcggcgcgacagtcgataatcaccaacagcccaatgggggtgtgttggataacaacgcctccgcgcggcaggcggtcctggcgctcccggccccgtaccatgatcgcgcgggtgccgtactcaaaaacatgcaccacctgcgcggcgtcgggcagtgcgctggtcagcgaggccctggcgtggcataggctatacgcgatggtcgtctgtggattggacatctcgcggtgggtagtgagtcccccgggccgggttcggtggaactgtaaggggacggcgggttaatatacaatgaccacgttcggatcgcgcagagccgatagtatgtgcttactaatgacgtcatcgcgctcgtggcgctcccggagcggatttaagttcatgcgaaggaattcggaggaggtggtgcgggacatggccacgtacgcgctgttgaggcgcaggttgccgggcgtaaagcagatggcgaccttgtccaggctaaggccctgggagcgcgtgatggtcatggcaagcttggagctgatgccgtagtcggcgtttatggccatggccagctccgtagagtcaatggactcgacaaactcgctgatgttggtgttgacgacggacatgaagccgtgttggtcccgcaagaccacgtaaggcaggggggcctcttccagtaactcggccacgttggccgtcgcgtgccgcctccgcagctcgtccgcaaaggcaaacacccgtgcgtacgtgtatcccatgagcgtataattgtccgtctgcagggcgacggacatcagccccccgcgcggcgagccggtcagcatctcgcagccccggaagataacgttgtccacgtacgtgctaaagggggcgccttcaaatgcctccccaaagagctcttggaggattcggaatctcccgaggaaggcccgcttcagcagcgcaaactgggtgtgaacggcggcggtggtctccggttccccgggggtgtagtggcagtaaaacacgtcgagctgttgttcgtccagccccgcgaaaataacgtcgaggtcgtcgtcgggaaaatcgtccgggcccccgtcccgcggccccagttgcttaaaatcaaacgcacgctcgccgggggcgcctgcgtcggccattaccgacgcctgcgtcggcacccccgaagatttggggcgcagagacagaatctccgccgttagttctcccatgcgggcgtaggcgagggtcctctgggtcgcatccaggcccgggcgctgcagaaagttgtaaaaggagataagcccgctaaatatgagccgcgacaggaacctgtaggcaaactccaccgaagtctccccctgagtctttacaaagctgtcgtcacgcaacactgcctcgaaggcccggaacgtcccactaaacccaaaaaccagttttcgcaggcgcgcggttaccgcgatctggctgttgaggacgtaagtgacgtcgttgcgggccacgaccagctgctgtttgctgtgcacctcgcagcgcatgtgccccgcgtcctggtcctggctctgcgagtagttggtgatgcggctggcgttggccgtgagccacttttcaatagtcaggccgggctggtgtgtcagccgtcggtattcgtcaaactccttgaccgacacgaacgtaagcacggggagggtgaacacgacaaactccccctcacgggtcaccttcaggtaggcgtggagcttggccatgtacgcgctcacctctttgtgggaggagaacaaccgcgtccagccggggaggttggcggggttggtgatgtagttttccgggacgacgaagcgatccacgaactgcatgtgctcctcggtgatgggtaggccgtactccagcaccttcatgaggttaccgaactcgtgctcgatgcaccgtttgttgttaataaaaatggcccagctatacgagaggcgggcgtactcccgcagcgtgcggttgcagatgaggtacgtgagcacgttctcgctctggcggacggaacaccgcagtttctggtgctcgaaggtcgactccagggacgccgtctgtgtcggcgagcccacacacaccaacacgggccgcaggcgggccgcgtactggggggtgtggtacagggcgttaatcatccaccagcaatacaccacggccgtgaggaggtgacgcccaaggagcccggcctcgtcgatgacgatcacgttgctgcgggtaaaggccggcagcgccccgtgggtggccggggccaaccgcgtcagggcgccctcggccaaccccagggtccgttccagggcggccagggcgcgaaactcgttccgcgactcctcgcccccggaggcggccagggtgcgcttcgtgaggtccaaaatcacctcccagtagtacgtcagatctcgtcgctgcaggtcctccagcgaggcggggttgctggtcagggtgtacgggtactgccccagttgggcctggacgtgattcccgcgaaacccaaattcatgaaagatggtgttgatgggtcggctgagaaaggcgcccgagagtttggcgtacatgttttgggccgcaatgcgcgtggcgcccgtcaccacacagtccaagacctcgttgattgtctgcacgcacgtgctctttccggagccagcgttgccggtgataagatacaccgcgaacggaaactccctgaggggcaggcctgcgggggactctaaggccgccacgtcccggaaccactgcagacggggcacttgcgctccgtcgagctgttgttgcgagagctctcggatgcgcttaaggattggctgcaccccgtgcatagacgtaaaatttaaaaaggcctcggccctccctggaacggctggtcggtccccgggttgctgaaggtgcggcgggccgggtctctgtccgtctagctggcgctccccgccggccgccgccatgaccgcaccacgctcgcgggcccccactacgcgtgcgcggggggacacggaagcgctgtgctcccccgaggacggctgggtaaaggttcaccccacccccggtacgatgctgttccgcgagattctccacgggcagctggggtataccgagggccagggggtgtacaacgtcgtccggtccagcgaggcgaccacccggcagctgcaggcggcgatctttcacgcgctcctcaacgccaccacttaccgggacctcgaggcggactggctcggccacgtggcggcccgcggtctgcagccccaacggctggttcgccggtacaggaacgcccgggaggcggatatcgccggggtggccgagcgggtgttcgacacgtggcggaacacgcttaggacgacgctgctggactttgcccacgggttggtcgcctgctttgcgccgggcggcccgagcggcccgtcaagcttccccaaatatatcgactggctgacgtgcctggggttggtccccatattacgcaagcgacaagaagggggtgtgacgcagggtctgagggcgtttctcaagcagcacccgctgacccgccagctggccacggtcgcggaggccgcggagcgcgccggccccgggttttttgagctggcgctggccttcgactccacgcgcgtggcggactacgaccgcgtgtatatttactacaaccaccgccggggcgactggctcgtgcgagaccccatcagcgggcagcgcggagaatgtctggtgctgtggcctcccttgtggaccggggaccgtctggtcttcgattcgcccgtacagcggctgtttcccgagatcgtcgcgtgtcactccctccgggaacacgcgcacgtctgccggctgcgcaataccgcgtccgtcaaggtgctgctggggcgcaagagcgacagcgagcgcggggtggccggcgccgcgcgggtcgttaacaaggtgttgggggaggacgacgagaccaaggccgggtcggccgcctcgcgcctcgtgcggcttatcatcaacatgaagggcatgcgccacgtaggcgacattaacgacactgtgcgtgcctacctcgacgaggccggggggcacctgatagacgccccggccgtcgacggtaccctcccgggattcggcaagggcggaaacagccgcgggtctgcgggccaggaccagggggggcgggcgccgcagcttcgccaggccttccgcacggccgtggttaacaacatcaacggcgtgttggagggctatataaataacctgtttggaaccatcgagcgcctgcgcgagaccaacgcgggcctggcgacccagttgcaggagcgcgaccgcgagctccggcgcgcaacatcgggggccctggagcgccagcagcgcgcggccgacctggcggccgagtccgtgaccgggggatgcggcagccgccctgcgggggcggacctgctccgggccgactatgacattatcgacgtcagcaagtccatggacgacgacacgtacgtcgccaacagttttcagcacccgtacatcccttcgtacgcccaggacctggagcgcctgtcgcgcctctgggagcacgagctggtgcgctgtttcaaaattctgtgtcaccgcaacaaccagggccaagagacgtcgatctcgtactccagcggggcgatcgccgcattcgtcgccccctactttgagtcagtgcttcgggccccccgggtaggcgcgcccatcacgggctccgatgtcatcctgggggaggaggagttatgggatgcggtgtttaagaaaacccgcctgcaaacgtacctgacagacatcgcggccctgttcgtcgcggacgtccagcacgcagcgctgcccccgcccccctccccggtcggcgccgatttccggcccggcgcgtccccgcggggccggtccagatcgcggtcgcccggaagaactgcgcgaggcgcgccggaccagggcgggggcatcgggcaccgggatggccgccgcgacggccgacgatgaggggtcggccgccaccatcctcaagcaggccatcgccggggaccgcagcctggtcgaggcggccgaggcgattagccagcagacgctgctccgcctggcctgcgaggtgcgccaggtcggcgaccgccagccgcggtttaccgccaccagcatcgcgcgcgtcgacgtcgcgcctgggtgccggttgcggttcgttctggacgggagtcccgaggacgcctatgtgacgtcggaggattactttaagcgctgctgcggccagtccagttatcgcggcttcgcggtggcggtcctgacggccaacgaggaccacgtgcacagcctggccgtgccccccctcgttctgctgcaccggttctccctgttcaaccccagggacctcctggactttgagcttgcctgtctgctgatgtacctggagaactgcccccgaagccacgccaccccgtcgacctttgccaaggttctggcgtggctcggggtcgcgggtcgccgcacgtccccattcgaacgcgttcgctgccttttcctccgcagttgccactgggtcctaaacacactcatgttcatggtgcacgtaaaaccgttcgacgacgagttcgtcctgccccactggtacatggcccggtacctgctggccaacaacccgccccccgttctctcggccctgttctgtgccaccccgacaagctcctcattccggctgccggggccgcccccccgctccgactgcgtggcctataaccccgccgggatcatggggagctgctgggcgtcggaggaggtgcgcgcgcctctggtctattggtggctttcggagaccccaaaacgacagacgtcgtcgctgttttatcagttttgttgaattttaggaaataaacccggttttgtttctgtggcctcccgacggatgcgcgtgtccttactccgtcttggtgggtgggtggctgtgtatggcgtcccatctgtgcggggaggggggcaagtcggcacgtattcggacagactcaagcacacacgggggagcgctcttgtctcagggcaatgtttttattggtcaaactcaggcaaacagaaacgacatcttgtcgtcaaagggatacacaaacttccccccctcgccccatactcccgccagcaccccggtaaacaccaactcaatctcgcgcaggatttcgcgcaggtgatgagcgcagtccacgggggggagcacaaggggccgcgggtatagatcgacggggacgccgaccgactccccgcctccgggacagacacgcacgacgcgccgccagtagtgctctgcgtccagcaaggcgccgccgcggaaggcagtggggggcaaggggtcgctggcctcaaagggggacacccgaacgctccagtactccgcgtccaaccgtttattaaacgcgtccaagataaggcggtcgcaggcgtcctccataaggccccgggccgtgagtgcgtcctcctccggcacgcctgccgttgtcaggcccaggacccgtcgcagcgtgtcgcgtacgaccccggccgccgtggtgtacgcgggcccgcggagaggaaatcccccaagatggtcagtgttgtcgcgggagttccagaaccacactcccgcctggctccaggcgactgcgtgggtgtagacgccctcgagggccaggcacagtgggtgccgcagccggaggccgttggccctaagcacggctcccacggccgtctcgatggcccgccgggcgtcctcgatcaccccggaagccgcatccgcgtcttgggggtccacgttaaagacaccccagaacgcacccccatcgcccccgcagaccgcgaacttcaccgagctggccgtctcctcgatctgcaggcagacggcggccattaccccacccaggagctgccgcagcgcagggcaggcgttgcacgtgtccgggaccaggcgctccaagacggccccggcccagggctctgagggagcggccaccaccagcgcgtccagtcttgctaggcccgtccggccgtgggggtccgccagcccgctccccccgaggtcggccagggccgccaggagctgggcgcgaagtccggggaagcaaaaccgcgccgtccagacgggcccgacggccgcgggcgggtctaacagttggatgattttagtggcgggatgccaccgcgccaccgcctcccgcactgcgggcaggaggcatccggctgccgccgaggccacgccgggccaggctcgcggggggaggacgaccctgacccccaccgcgggccaggcccccaggagcgcggcgtaagcggccgcggccccgcgcaccaggtcccgtgccgactcggccgtggccggcacggtgaacgtgggccaacccggaaaccccaggacggcaaagtacgggacgggtcccccccggacctcaaactcgggccccagaaaggcaaagacgggggccagggccccgggggcggcgtggaccgtggtatgccactgccggaaaagggcgacgagcgccggcgcggagaacttctcgccggcgcttacaaagtagtcgtaatcgcggggcagcagcacccgtgccgtgactcgttgcgggtgcccgcgtggccgcaggcccacctcgcacacctcgaccaggtccccgaacgcgccctccttcttgatcggcggaaacgcaagagtctggtattcgcgcgcaaatagcgcggttccggtggtgatgttaacggtcagcgaagcggtggacgcgcactggggggtgtcgcgaatggccgccaggcgcgcccacgccagccgcgcgtcgggatgctcggcaacgcgcgccgccagggccatagggtcgatgtcaatgttggcctccgcgaccaggagagcggcgcgaggggcggcgggcgggccccacgacgctctctcaactttcaccaccagtcccgtgcgtgggtccgagccgatacgcagcggggcgaacagggccaccggcccggtctggcgctccagggccgccaggacgcacgcgtacagcgcccgccacagagtcgggttctccaggggctccagcggggaggcggccggcgtcgtcgcggcgcgggcggccgccacgacggcctggacggagacgtccgcggagccgtagaaatcccgcagctccgtcgcggtgacggagacctccgcaaagcgcgcgcgaccctcccctgcggcgttgcgacatacaaaatacaccagggcgtggaagtactcgcgagcgcgggggggcagccataccgcgtaaagggtaatggcgctgacgctctcctccacccacacgatatctgcggtgtccatcgcacggcccctaaggatcacgggcggtctgtgggtcccatgctgccgtgcctggccgggcccggtgggttgcggaaaccggtgacgggggggggggcggtttttggggttggggtgggaaacggcccgggtccgggggccaacttggcccctcggtgcgttccggcaacagcgccgccggtccgcggacgaccacgtaccgaacgagtgcggtcccgagacttatagggtgctaaagttcaccgccccctgcatcatgggccaggcctcggtggggagctccgacagcgccgcctccaggatgatgtcagcgttggggttggcgctggatgagtgcgtgcgcaaacagcgcccccacgcgggcacgcgtagcttgaagcgcgcgcccgcaaactcccgcttgtgggccataagcagggcgtacagctgcctgtgggtccggcaggcgctgtggtcgatgtggtgggcgtccaacaaccccacgattgtctgtttggtgaggtttttaacgcgccccgccccgggaaacgtctgcgtgcttttggccatctgcacgccaaacagttcgccccagattatcttgaacagcgccaccgcgtggtccgtctcactaacggacccgcgcgggggacagccgcttagggcgtcggcgacgcgcttgacggcttcctccgagagcagaagtccgtcggttacgttacagtggcccagttcgaacaccagctgcatgtagcggtcgtagtggggggtcagcaggtccagcacgtcatcggggccgaaggtcctcccagatcccccggccgccgagtcccaatgcaggcgcgcggccatggtgctgcacaggcacaacagctcccagacaggggttacgttcagggtggggggcagggccacgagctccagctctccggtgacgttgatcgtggggatgacgcccgtggcgtagtggtcatagatccgccgaaatatggcgctgctgcgggtggccatgggaacgcggagacaggcctccagcaacgccaggtaaataaaccgcgtgcgtcccatcaggctgttgaggttgcgcatgagcgcgacaatttccgccggcgcgacatcggaccggaggtatttttcgacgaaaagacccacctcctccgtctcggcggcctgggccggcagcgacgcctcgggatcccggcaccgcagctcccgtagatcgcgctgggccctgagggcgtcgaaatgtacgccccgcaaaaacagacagaagtcctttggggtcagggtatcgtcgtgtccccagaagcgcacgcgtatgcagtttagggtcagcagcatgtgaaggatgttaaggctgtccgagagacacgccagcgtgcatctctcaaagtagtgtttgtaacggaatttgttgtagatgcgcgacccccgccccagcgacgtgtcgcatgccgacgcgtcacagcgccccttgaaccggcgacacagcaggtttgtgacctgggagaactgcgcgggccactggccgcaggaactgaccacgtggttcaggagcatgggcgtaaagacgggctccgagcgcgccccggagccgtccatgtaaatcagtagctcccccttgcggagggtgcgcacccgtcccagggactggtacacggacaccatgtccggtccgtagttcatgggtttcacgtaggcgaacatgccatcaaagtgcaggggatcgaagctgaggcccacggttacgaccgtcgtgtatataaccacgcggtattggccccacgtggtcacgtccccgaggggggtgagcgagtgaagcaacagcacgcggtccgtaaactgacggcagaaccgggccacgatctccgcgaaggagaccgtcgacgaaaaaatgcagatgttatcgcccccgccaaggcgcgcttccagctccccaaagaacgtggccccccgggcgtccggagaggcgtccggagacgggccgctcggcggcccgggcgggcgcagggcagcctgcaggagctcggtccccagacgcgggagaaacaggcaccggcgcgccgaaaacccgggcatggcgtactcgccgaccaccacatgcacgtttttttcgccccggagaccgcacaggaagtccaccaactgcgcgttggcggttgcgtccatggcgatgatccgaggacatgtgcgcagcaggcgtagcattaacgcatccacgcggcccagttgctgcatcgttggcgaatagagctggcccagcgtcgacataacctcgtccagaacgaggacgtcgtagttgttcagaaggttggggcccacgcgatgaaggctttccacctggacgataagtcggtggaaggggcggtcgttcataatgtaattggtggatgagaagtaggtgacaaagtcgaccaggcctgactcagcgaaccgcgtcgccagggtctgggtaaaactccgacgacaggagacgacgagcacactcgtgtccggagagtggatcgcttcccgcagccagcggatcagcgcggtagtttttcccgaccccattggcgcgcggaccacagtcacgcacctggccgtcggggcgctcgcgttggggaaggtgacgggtccgtgctgctgccgctcgatcgttgttttcgggtgaacccggggcacccattcggccaaatcccccccgtataacatccgcgctagcgatacgctcgacgtgtactgttcgcactcgtcgtccccaatgggacgcccggcccccagaggatcccccgactccgcgccccccacgaaaggcatgaccggggcgcggacggcgtggtgggtctggtgtgtgcaggtggcgacgtttgtggtctctgcggtctgcgtcacggggctcctcgtcctggcctctgtgttccgggcacggtttccctgcttttacgccacggcgagctcttatgccggggttaactccacggccgaggtgcgcgggggtgtagccgtgcccctcaggttggacacgcagagccttgtgggcacttatgtaatcacggccgtattgttgttggccgcggccgtgtatgccgtggtcggcgccgtgacctcccgctacgaccgcgccctggacgcgggccgccgtctggctgcggcccgcatggccatgccgcacgccacgctgatcgccggaaacgtctgctcttggttgctgcagatcaccgtcctgctgctggcccatcgcatcagccagctggcccacctggtttacgtcctgcactttgcgtgtctggtgtattttgcggcccatttttgcaccaggggggtcctgagcgggacgtatctgcgtcaggtgcacggcctgatggagctggccccgacccatcatcgcgtcgtcggcccggctcgcgccgtgctgacaaacgccttgctgttgggcgtcttcctgtgcacggccgacgccgcggtatccctgaataccatcgccgcgttcaactttaatttttcggccccgggcatgctcatctgcctgaccgtgctgttcgccattctcgtcgtatcgctgttgttggtggtcgagggggtgttgtgtcactacgtgcgcgtgttggtgggcccccacctgggggccgttgccgccacgggcatcgtcggcctggcctgcgagcactattacaccaacggctactacgtggtggagacgcagtggccgggggcacagacgggagtgcgcgtcgccctcgccctggtcgccgcctttgccctcggcatggccgtgctccgctgcacccgcgcctatctgtatcacaggcggcaccacaccaaattttttatgcgcatgcgcgacacgcgacaccgcgcacattccgccctcaagcgcgtacgcagttccatgcgcggatcgcgagacggccgccacaggcccgcgcccggcagcccgcccgggattcccgaatatgcggaagacccctacgcgatctcatacggcggccagctcgaccggtacggagattccgacggggagccgatttacgacgaggtggcggacgaccaaaccgacgtattgtacgccaagatacaacacccgcggcacctgcccgacgacgagcccatctatgacaccgttggggggtacgaccccgagcccgccgaggaccccgtgtacagcaccgtccgccgttggtagctgtttggttccgttttaataaaccgtttgtgtttaacccgaccgtggtgtatgtctggtgtgtggcgtccgatcccgttactatcaccgtccccccccctcaaccccggcgattgtgggttttttaaaaacgacacgcgtgcgaccgtatacagaacattattttggtttttattcgctatcggacatggggggtggaaactgggtggcggggcaggcgcctccgggggtccgccggtgagtgtggcgcgagggggggtccgacgaacgcaggcgcggtctccccggggcccgcgtaaccacgcgcatatccgggggcacgtagaaattaccttcctcttcggactcgatatccacgacgtcaaagtcgtgggcggtcagcgagacgacctccccgtcgtcggtgatgaggacgttgtttcggcagcagcagggccgggccccggagaacgagaggcccatagctcggcgagcgtgtcgtcgaacgccaggcggctgcttcgctggatggccttatagatctccggatcgatgcggacgggggtaatgatcagggcgatcggaacggcctggttcgggagaatggacgccttgctgggtcctgcggccccgagagccccggcgccgtcctccaggcggaacgttacgccctcctccgcgctggtgcggtgcctgccgataaacgtcaccagatgcgggtggggggggcagtcggggaagtggctgtcgagcacgtagccctgcaccaagatctgcttaaagttcgggtggcgggggttcgcgaagacgggctcgcggcggaccagatccccggagctccaggacacgggggagatggtgtggcgtccgaggtcgggggcgccaaacagaagcacctccgagacaacgccgctatttaactccaccaaggcccgatccgcggcggagcaccgccttttttcgcccgaggcgtgggcctctgaccaggcctggtcttgcgtgacgagagcctcctccgggccggggacgcgcccgggcgcgaagtatcgcacgctgggcttcgggatcgaccggataaatgcccggaacgcctccggggaccggtgtgccatcaagtcctcgtacgcggaggccgtggggtcgctggggtccatggggtcgaaagcgtacttggcccggcatttgacctcgtaaaaggccaggggggtcttggggactggggccaggtagccgtgaatgtcccgaggacagacgagaatatccagggacgccccgaccatccccgtgtgaccgtccatgaggaccccacacgtatgcacgttctcttcggcgaggtcgctgggttcgtggaagataaagcgccgcgtgtcggcgccggcctcgccgccgtcgtccgcgcggcccacgcagtagcgaaacagcaggcttcgggccgtcggctcgttcacccgcccgaacatcaccgccgaagactgtacatccggtcgcaggctggcgttgtgcttcagccactggggcgagaaacacggaccctgggggccccagcggagggtggatgcggtcgtgaggccccgccggagcagggcccatagctggcagtcggcctggttttgcgtggccgcctcgtaaaaccccatgaggggccggggcgccacggcgtccgcggcggccgggggggcgcggcgcgtcaggcgccataggtgccggccgagtccgcggtccaccatacccgcctcctcgaggaccacggccagggaacacagataatccaggcgggcccagaggggaccgatggccagaggggcgcggacgccgcgcagcaacccgcgcaggtggcgctcgaacgtctcggctagtatatgggagggcagcgcgttggggatcaccgacgccgaccacatagagtcaaggtccggggagtcgggatcggcgtccgggtcgcgggcgtgggtgcccccaggagatagcggaatgtccggggtcggaggcccggaggcgtcagaaagtgccggcgacgcggcccggggcttttcgtctgcggtgtcggtggcgtgctgatcacgtggggggttatcgggcgaatgggagctcgggtccacagctgacgtcgtctggggtggggggggcaggggacggaaggtggttgtcagcggaagactgttagggcgggggcgcttgggggggctgtcggggccacgaggggtgtcctcggccagggcccagggacgcttagtcacggtgcgtcccggcggacatgctgggcctaccgtggactccatttccgagacgacgtggggggagcggtggttgagcgcgccgccgggtgaacgctgattctcacgacagcgcgtgccgcgcgcacgggttggtgtgacacaggcgggacaccagcaccaggagaggcttaagctcgggaggcagcgccaccgacgacagtatcgccttgtgtgtgtgctggtaatttatacaccgatccgtaaacgcgcgccgaatcttgggattgcggaggtggcgccggatgccctctgggacgtcatacgccaggccgtgggtgttggtctcggccgagttgacaaacagggctgggtgcagcacgcagcgataggcgagcagggccagggcgaagtccggcgacagctggttgttgaaatactggtaaccgggaaaccgggtcacgggtacgcccaggctcggggcgacgtacacgctaaccaccaactccagcagcgtctggcccagggcgtacaggtcaaccgctagcccgacgtcgtgcttcaggcggtggttggtaaattcggcccgttcgttgttaaggtatttcaccaacagctccgggggctggttatacccgtgacccaccagggtgtgaaagttggctgtggttagggcggtgggcatgccaaacatccggggggacttgaggtccggctcctggaggcaaaactgcccccgggcgatcgtggagttggagttgagggtgacgaggctaaagtcggcgaggacggcccgccggagcgagacggcgtccgaccgcagcatgacgaggatgttggcgcacttgatatccaggtggctgatcccgcaggtggtgtttaaaaacacaacggcacgggccagctccgtgaagcactggtggagggccgtcgagaccgaggggtttgttgtgcgcagggacgccagttggccgatatacttaccgaggtccatgtcgtacgcggggaacactatctgtcgttgttgcagcgagaacccgaggggcgcgatgaagccgcggatgttgtgggtgcggccggcgcgtagagcgcactccccgaccaacagggtcgcgatgagctcaacggcaaaccactccttttcctttatggtcttaacggcaagcttatgttcgcgaatcagttggacttcgccgtatcccccagaccccccgaagcttcgggccccggggatctcgagggtcgtgtagtgtagggcggggttgatggcgaacacggggctgcatagcttgcggatgcgcgtgagggtgaggatgtgcgagggggacgaggggggtgcggttaacgccgcctgggatctgcgcaggggcgggcggttcagtttggccgccgtaccgggcgcctcgggggacgcgcggcgatgagacgagcggctcattcgccatcgggatagtcccgcgcgaagccgctcgcggaggccggatcggtggcggcacccgtgggaggagcgggagacggcggcgttctggagagaggggccgctggggcgcccggaggccccatgggggttggagtgtatgtaggatgcgagccaatccttgaaggaccgttggcgtgcaccttgggggctgaggttagctgccacatgaccagcaggtcgctgtctgcgggactcatccatccttcggccaggtcgccgtctccccacagagaagcgttggtcgctgcctcctcgagttgctcctcctggtccgcaagacgatcgtccacggcgtccaggcgctcaccaagcgccggatcgaggtaccgtcggtgtgcggttagaaagtcacgacgcgccgcttgctcctccacgcgaattttaacacaggtcgcgcgctgtcgcatcatctctaagcgcgcgcgggactttagccgcgcctccaattccaagtgggccgcctttgcagccataaaggcgccaacaaaccgaggatcttgggtgctgacgccctcccggtgcagctgcagggtctggtccttgtaaatctcggctcggaggtgcgtctcggccaggcgtcggcgcagggccgcgtgggcggcatctcggtccattccgccaccctgcgggcgacccgggggtgctctgatagtctcgcgtgcccaaggcccgtgatcggggtacttcgccgccgcgacccgccacccggtgtgcgcgatgtttggtcagcagctggcgtccgacgtccagcagtacctggagcgcctcgagaaacagaggcaacttaaggtgggcgcggacgaggcgtcggcgggcctcacaatgggcggcgatgccctacgagtgccctttttagatttcgcgaccgcgacccccaagcgccaccagaccgtggtcccgggcgtcgggacgctccacgactgctgcgagcactcgccgctcttctcggccgtggcgcggcggctgctgtttaatagcctggtgccggcgcaactaaaggggcgtgatttcgggggcgaccacacggccaagctggaattcctggcccccgagttggtacgggcggtggcgcgactgcggtttaaggagtgcgcgccggcggacgtggtgcctcagcgtaacgcctactatagcgttctgaacacgtttcaggccctccaccgctccgaagcctttcgccagctggtgcactttgtgcgggactttgcccagctgcttaaaacctccttccgggcctccagcctcacggagaccacgggcccccccaaaaaacgggccaaggtggacgtggccacccacggccggacgtacggcacgctggagctgttccaaaaaatgatccttatgcacgccacctactttctggccgccgtgctcctcggggaccacgcggagcaggtcaacacgttcctgcgtctcgtgtttgagatccccctgtttagcgacgcggccgtgcgccacttccgccagcgcgccaccgtgtttctcgtcccccggcgccacggcaagacctggtttctggtgcccctcatcgcgctgtcgctggcctcctttcgggggatcaagatcggctacacggcgcacatccgcaaggcgaccgagccggtgtttgaggagatcgacgcctgcctgcggggctggttcggttcggcccgagtggaccacgttaaaggggaaaccatctccttctcgtttccggacgggtcgcgcagtaccatcgtgtttgcctccagccacaacacaaacgtaagtcctcttttctttcgcatggctctcccaaggggccccgggtcgacccgacccacacccacccacccacatacacacacaaccagacgcgggaggaaagtctgccccgtgggcactgatttttattcgggatcgcttgaggaggcccgggcaacggcccgggcaacggtggggcaactcgtagcaaataggcgactgatgtacgaagagaagacacacaggcgccacccggcgctggtcggggggatgttgtccgcgccgcaccgtcccccgacgacctcttgcagacggtccgtgatgcaaggacggcggggggcctgcagcagggtgaccgtatccacgggatggccaaagagaagcggacacaggctagcatccccctggaccgccagggtacactgggccatcttggcccacagacacggggcgacgcagggacaggactccgttacgacggaggagagccacagtgcgttggcggaatcgatgtggggcggcggggcgcaggactcgcagccccccgggtggttagtgatcctggccaggagccatcccagatggcgggccctgcttcccggtggacagagcgaccccaggtcgctgtccatggcccagcagtagatctggccgctggggaggtgccaccaggcccccgggcccaaggcgcagcacgcgcccggctccgggggggtcttcgcggggaccagatacgcgccatccagctcgccgaccactggctcctccgcgagctgttcggtggttgggtcgggggtttcctccgggggggtggccgcccgtatgcgggcgaacgtgagggtgcacaggagcggggtcagggggtgcgtcacgctccggaggtggacgatcgcgcagtagcggcgctcgcggttaaagaaaaagagggcaaagaaggtgttcgggggcaaccgcagcgccttggggcgcgtcagatacagaaaaatctcgcagaagagggcgcgcccggggtctgggttaggaagggccacctgacacagaggctcggtgaggaccgttagacaccgaaagatcttgagccgctcgtccgcccgaacgacgcgccacacaaagacggagttgacaatgcgcgcgatagagtcgacgtccgtccccaggtcgtcgactctgtcgcgcgtgccgcgagctccggcccgggaatccggccggggcaaggtccccgggggaccaggcggcgccaggggccgccggggtcccagctgcgccatgccgggggcggggggagggcaaaccccagaggcgggggccaacggcgcggggaggagtggatgggcgaggtggccgggggaaggcgcccgctagcgagaacggccgttcccggacgacaccttgcgacaaaacctaaggacagcggcccgcgcgacggggtccgagaggctaaggtaggccgcgatgttaatggtgaacgcaaagccgccgggaaagacaactatgccacagaggcggcgattaaaccccaggcagaggtaggcgtagctttccccgggcaggtattgctcgcagaccctgcgtggggctgtggaggggacggcctccatgaagcgacatttactctgctcgcgtttactgacgtcaccatccatcgccacggcgattggacgattgttaagccgcagcgtgtctccgcttgtgctgtagtagtcaaaaacgtaatggccgtcggagtcggcaaagcgggccgggaggtcgtcgccgagcgggacgacccgccgcccccgaccgccccgtccccccaggtgtgccaggacggccagggcatacgcggtgtgaaaaaaggcgtcgggggcggtcccctcgacggcgcgcatcaggttctcgaggagaatggggaagcgcctggtcacctcccccagccacgcgcgttggtcggggccaaagtcatagcgcaggcgctgtgagattcgcgggccgccctgaagcgcggcccggatggcctggcccagggcccggaggcacgccagatgtatgcgcgcggtaaaggcgacctcggcggcgatgtcaaagggcggcaggacggggcgcgggtggcgcaggggcacctcgagcgcgggaaagcggagcagcagctccgcctgcccagcgggagacagctggtgggggcgcacgacgcgttctgcggcgcaggcctcggtcagggccgtggccagcgccgaggacagcagcggagggcgggcgcgtcgcccgccccacgccactgagttctcgtaggagacgacgacgaagcgctgcttggttccgtagtggtggcgcaggaccacggagatagaacgacggctccacagccagtccggccggtcgccgccggccagggcttcccatccgcgatccaaccactcgaccagcgaccgcggctttgtggtaccaggggtaagggttagaacgtcgttcaggatgtcctcgcccccgggcccgtggggcgctggggccacaaagcggcccccgccggggggctccagacccgccagcaccgcatctgcgtcagccgcccccatggcgcccccgctgacggcctggtgaaccagggcgccctggcggagccccgatgcaacgccacaggccgcacgcccggtccgagcgcggaccgggtggcggcgggtgacgtcctgcactgcccgctgaaccaacgcgaggatctcctcgttctcctgtgcgatggacacgtcctgggccgcggtcgtgtcgccgccgggggccgtcagctgctcctccggggagatgggggggtcggacgccccgacgatgggcgggtctgcgggcgcccccgcgtggggccgggccaagggctgcggacgcggggacgcgctttcccccagacccatggacaggtgggccgcggcctccttcgcggccggcggggcggcggcgccaagcagagcgacgtagcggcacaaatgccgacagacgcgcatgatgcgcgtgctgtcggccgcgtagcgcgtgttgggggggacgagctcgtcgtaactaaacagaatcacgcgggcacagctcgcccccgagccccacgcgaggcgcagcgccgccacggcgtacgggtcatagacgccctgcgcgtcacacaccacgggcagggagacgaacaaccccccggcgctggacgcacgcggaaggaggccagggtgtgccggcacgacgggggccagaagctcccccaccgcatccgcgggcacgtaggcggcaaacgccgtgcaccacggggtacagtcgccggtggcatgagcccgagtctggatttcgacctggaagtttgcggccgtcccgagtccggggcggccgcgcatcagggcggccagagggattcccgcggccgccaggcactcgctggatatgatgacgtgaaccaaagacgagggccgacccgggccgtggccgagatcgtactggacctcgttggccaagtgcgcgttcatggttcggggtgggtgtgggtgtgtaggcgatgcgggtcccccgagtccgcgggaagggcgtgggtttggcgcgcgtatgcgtattcgccaacggaggcgtgcgtgcttatgcgcggcgcgtttcttctgtctccagggaatccgaggccaggactttaacctgctctttgtcgacgaggccaactttattcgcccggatgcggtccagacgattatgggctttctcaaccaggccaactgcaagattatcttcgtgtcgtccaccaacaccgggaaggccagtacgagctttttgtacaacctccgcggggccgccgacgagcttctcaacgtggtgacctatatatgcgatgatcacatgccgagggtggtgacgcacacaaacgccacggcctgttcttgttatatcctcaacaagcccgttttcatcacgatggacggggcggttcgccggaccgccgatttgtttctggccgattccttcatgcaggagatcatcgggggccaggccagggagaccggcgacgaccggcccgttctgaccaagtctgcgggggagcggtttctgttgtaccgcccctcgaccaccaccaacagcggcctcatggcccccgatttgtacgtgtacgtggatcccgcgttcacggccaacacccgagcctccgggaccggcgtcgctgtcgtcgggcggtaccgcgacgattatatcatctttgccctggagcacttttttctccgcgcgctcacgggctcggcccccgccgacatcgcccgctgcgtcgtccacagtctgacgcaggtcctggccttgcatcccggggcgtttcgcggcgtccgggtggcggtcgagggaaatagcagccaggactcggccgtcgccatcgccacgcacgtgcacacagagatgcaccgcctactggcctcggagggggccgacgcgggctcgggccccgagcttctcttctaccactgcgagcctcccgggagcgcggtgctgtacccctttttcctgctcaacaaacagaagacgcccgcctttgaacactttattaaaaagtttaactccgggggcgtcatggcctcccaggagatcgtttccgcgacggtgcgcctgcagaccgacccggtcgagtatctgctcgagcagctgaataacctcaccgaaaccgtctcccccaacactgacgtccgtacgtattccggaaaacggaacggcgcctcggatgaccttatggtcgccgtcattatggccatctaccttgcggcccaggccggacctccgcacacattcgctcccatcacacgcgtttcgtgagcgcccaataaacacacccaggtatgctacgcacgaccacggtgtcgcctgttaaggggggggaagggggtgttggcgggaagcgtgggaacacgggggattctctcacgaccggcaccagtaccacccccctgtgaacacagaaacccaacccaaatcccataaacatacgacacacaggcatattttggaatttcttgggtttttatttatttaggtatgctggggtttctccctggatgcccaccccccacccccccccgtgggtctagccgggccttagggatagcgtataacgggggccatgtctccggaccgcacaacggccgcgccgtcaaaggtgcacacccgaaccacgggagccagggccaaggtgtctcctagttggcccgcgtgggtcagccaggcgacgagcgcctcgtaaagcggcagccttcgctctccatcctgcaccagggccggggcttcggggtgaatgagctgggcggcctcccgcgtgacactctgcatctgcaggagagcgttcacgtacccgtcctgggcacttagcgcaaagagccgggggattagcgtaaggatgatggtggttccctccgtgatcgagtaaaccatgttaaggaccagcgatcgcagctcggcgtttacgggaccgagttgttggacgtccgccagcagcgagaggcgactcccgttgtagtacagcacgttgaggtctggcagccctccggggtttctggggctggggttcaggtcccggatgcccctggccacgagccgcgccacgatttcgcgcgccaggggcgatggaagcggaacgggaaaccgcaacgtgaggtccagcgaatccaggcgcacgtccgtcgcttggccctcgaacacgggcgggacgaggctgatggggtccccgttacagagatctacgggggaggtgttgcgaaggttaacggtgccggcgtgggtgaggcccacgtccaggggacaggcgacgattcgcgtgggaagcacccgggtgatgaccgcggggaagcgccttcggtacgccagcaacaaccccaacgtgtcgggactgacgcctccggagacgaaggattcgtgcgccacgtcggccagcgtcagttgccggcggatggtcggcaggaataccacccgcccttcgcagcgctgcagcgccgccgcatcggggcgcgagatgcccgagggtatcgcgatgtcagtttcaaagccgtccgccagcatggcgccgatccacgcggcagggagtgcagtggtggttcgggtggcgggaggagcgcggtgggggtcagcggcgtagcagagacgggcgaccaacctcgcataggacggggggtgggtcttagggggttgggaggcgacagggaccccagagcatgcgcggggaggtctgtcgggcccagacgcaccgagagcgaatccgtccacggagtcccggtctgggttttatggggcccggccctcggaatcgcggcttgtcggcggggacaaagggggcggggctagggggcttgcggaaacagaagacgcgtgggataaaagaatcgcactaccccaaggaagggcggggcggtttattacagagccagtcccttgagcggggatgcgtcatagacgagatactgcgcgaagtgggtctcccgcgcgtgggcttccccgttgcgggcgctgcggaggagggcggggtcgctggcgcaggtgagcgggtaggcctcctgaaacaggccacacgggtcctccacgagttcgcggcaccccggggggcgcttaaactgtacgtcgctggcggcggtggccgtggacaccgccgaacccgtctccacgatcaggcgctccaggcagcgatgtttggcggcgatgtcggccgacgtaaagaacttaaagcaggggctgagcaccggcgaggccccgttgaggtggtaggccccgttatagagcaggtccccgtacgaaaatcgctgcgacgcccacgggttggccgtggccgcaaaggcccgggacgggtcgctctggccgtggtcgtacatgagggcggtgacatccccctccttgtcccccgcgtaaacgcccccggcggcgcgtccccgggggttgcagggccggcggaagtagttgacgtcggtcgacacgggggtggcgataaactcacacacggcgtcctggccgtggtccatccctgcgcgccgcggcacctgggcgcacccgaacacggggacgggctgggccggccccaggcggtttcccgccacgaccgcgttccgcaggtacacggctgccgcgttgtccaggagagggggagccccgcggcccaggtaaaagttttggggaaggttgcccatgtcggtgacggggttgcggacggttgccgtggccacgacggcggtgtagcccacgcccaggtccacgttcccgcgcggctgggtgagcgtgaagtttacccccccgccagtttcgtgccgggccacctggagctggcccaggaagtacgcctccgacgcgcgctccgagaacagcatgttctcagtcacaaagcggtcctgtcggacgacggtgaacccaaacccgggatggaggcccgtcttgagctgatgatgcaaggccacgggactgatcttgaagtaccccgccatgagcgcgtaggtcagcgcgttctccccggccgcgctctcgcggacgtgctgcacgacgggctgtcggatcgacgaaaagtagttggcccccagagccggggggaccagggggacctgccgcgacaggtcgcgcagggccggggggaaattgggcgcgttcgccacgtggtcggccccggcgaacagcgcgttgacgggaagggggtaaaaatagtcgccattttggatggtatggtccagatgctggggggccatcagcaggattccggcgtgcaacgccccgtcgaatatgcgcatgttggtggtggacgcggtgttggcgcccgcgtcgggcgccgccgagcagagcagcgccgttgtgcgttcggccatgttgtgggccagcacctgcagcgtgagcatggcgggcccgtccactaccacgcgcccgttgtgaaacatggcgttgaccgtgttggccaccagattggccgggtgcagggggtgcgcggggtccgtcacggggtcgctggggcactcctcgccgggggcgatctccgggaccaccatgttctgcagggtggcgtatacgcggtcgaagcgaacccccgcggtgcagcagcggccccgcgagaaggcgggcaccatcacgtagtagtaaatcttgtggtgcacggtccagtccgccccccggtgcggccggtcatccgcggcgtccgcggctcgggcctgggtgttgtgcagcagctggccgtcgttgcggttgaagtccgcggtcgccacgttacatgccgccgcgtacacggggtcgtggccccccgcgctaacccggcagtcgcgatggcggtccagggccgcgcgccgcatcagggcgtcacagtcccacacgaggggtggcagcagcgccgggtctcgcattaggtgattcagctcggcttgcgcctgcccgcccagctccgggccggtcagggtaaagtcatcaaccagctgggccagggcctcgacgtgcgccaccaggtcccggtacacggccatgcactcctcgggaaggtctcccccgaggtaggtcacgacgtacgagaccagcgagtagtcgttcacgaacgccgcgcaccgcgtgttgttccagtagctggtgatgcactggacaacgagccgggccagggcgcagaagacgtgctcgctgccgtgtatggcggcctgcagcaggtaaaacaccgccgggtagttgcggtcgtcgaacgccccgcgaacggcggcgatggtggcgggggccatggcgtggcgtcccacccccagctccaggccccgggcgtcccggaacgccgccggacatagcgccaggggcaagttgccgttcaccacgcgccaggtggcctggatctcccccgggccggccgggggaacgtccccccccggcagctccacgtcggccacccccacgaagaagtcgaacgcggggtgcagctcaagagccaggttggcgttgtcgggctgcataaactgctccggggtcatctggccttccgcgacccatcggacccgcccgtgggccaggcgctgcccccaggcgttcaaaaacagctgctgcatgtctgcggcggggccggccggggccgccacgtacgccccgtacggattggcggcttcgacggggtcgcggttaaggcccccgaccgccgcgtcaacgttcatcagcgaagggtggcacacggtcccgatcgcgtgttccagagacaggcgcagcacctggcggtccttcccccaaaaaaacagctggcggggcgggaaggcgcggggatccgggtggccgggggcggggactaggtccccggcgtgcgcggcaaaccgttccatgaccggattgaacaggcccaggggcaggacgaacgtcaggtccatggcgcccaccagggggtagggaacgttggtggcggcgtagatgcgcttctccagggcctccagaaagaccagcttctcgccgatggacaccagatccgcgcgcacgcgcgtcgtctggggggcgctctcgagctcgtccagcgtctgccggttcaggtcgagctgctcctcctgcatctccagcaggtggcggcccacgtcgtccagacttcgcacggccttgcccatcacgagcgccgtgaccaggttggccccgttcaggaccatctcgccgtacgtcaccggcacgtcggcttcggtgtcctccactttcaggaaggactgcaggaggcgctgtttgatcggggctgtggtgactagcaccccgtcgaccggccgcccgcgcgtgtcggcatgcgtcagacggggcacggccacggagggctgcgtggccgtggtgaggtccacgagccaggcctcgacggcctcccggcggtggcccgccttgcccaggaaaaagctcgtctcgcagaagcttcgctttagctcggcgaccagggtcgcccgggccaccctggtggccaggcggccgttgtccaggtatcgttgcatcggcaacaacaaagccaggggcggcgccttttccagcagcacgtgcagcatctggtcggccgtgccgcgctcaaacgccccgaggacggcctggacgttgcgagcgagctgttggatggcgcgcaactggcgatgcgcgctgatacccgtcccgtccagggcctcccccgtgagcagggcgatggcctcggtggccaggctgaaggcggcgttcagggcccggcggtcgataatcttggtcatgtaattgtgtgtgggttgctcgatggggtgcgggccgtcgcgggcaatcagcggctggtggacctcgaactgtacgcgcccctcgttcatgtaggccagctccggaaacttggtacacacgcacgccaccgacaacccgagctccagaaagcgcacgagcgacagggtgttgcaatacgaccccagcagggcgtcgaactcgacgtcgtacaggctgtttgcatcggagcgcacgcgggaaaaaaaatcgaacaggcgtcgatgcgacgccacctcgatcgtgctaaggagggacccggtcggcaccatggccgcggcataccggtatcccggagggtcgcggttgggagcggccatggggtcgcgtggagatcggctgtctctagcgatattggcccggggaggctaagatccaccccaacgcccggccacccgtgtacgtgcccgacggcccaaggtccaccgaaagacacgacggacccggacccaaagaggcgggggatgctgtgtgagaggccgggtgtcggtcgggggggaaaggcaccgggagaaggctgcggcctcgttccaggagaacccagtgtccccaacagacccggggacgtgggatccccggccttatatacccccccccgccccacccccgttagaacgcgacgggtgcattcaagatggccctggtccaaaagcgtgccaggaagaaattggcagaggcggcaaagctgtccgccgccgccacccacatcgaggccccggccgcacaggctatccccagggcccgtgtgcgcaggggatcggtgggtggcagcatttggttggtggcgataaagtggaaaagcccgtccggactgaaggtctcgtgggcggcggcgaacaaggcacacagggccgtgcctcccaaaaacacggacatcccccaaaacacgggcgccgacaacggcagacgatccctcttgatgttaacgtacaggaggagcgcccgcaccgcccacgtaacgtagtagccgacgatggcggccaggatacaggccggcgccaccacccttccggtcagcccgtaatacatgcccgctgccaccatctccaacggcttcaggaccaaaaacgaccaaaggaacagaatcacgcgctttgaaaagaccggctgggtatggggcggaagacgcgagtatgccgaactgacaaaaaaatcagaggtgccgtacgaggacaatgaaaactgttcctccagcggcagttctccctcctcccccccgaaggcggcctcgtcgaccagatctcgatccaccagaggaaggtcatcccgcatggtcatggggtgtgcggtggaggtggggagaccgaaaccgcaaagggtcgcttacgtcagcaggatcccgagatcaaagacacccgggttcttgcacaaacaccacccgggttgcatccgcggaggcgagtgttttgataaggccgttccgcgccttgatataacctttgatgttgaccacaaaacccggaatttacgcctacgccccaatgcccacgcaagatgaggtaggtaacccccccgtgggtgtgacgttgcgtttagttcattggaggccaaggggaaaaatggggtggggaggaaacggaaaacccagtaggccgtgtcgggaacacgcccggggttgtcctcaaaaggcagggtccatactacggaagccgtcgttgtattcgagacctgcctgtgcgacgcacgtcggggttgcctgtgtccggttcggcccccaccgcgtgcggcacgcacgaggacgagtccgcgtgctttattggcgttccaagcgttgccctccagtttctgttgtcggtgttcccccatacccacgcccacatccaccgtagggggcctctgggccgtgttacgtcgccgcccgcgatggagcttagctacgccaccaccatgcactaccgggacgttgtgttttacgtcacaacggaccgaaaccgggcctactttgtgtgcggggggtgtgtttattccgtggggcggccgtgtgcctcgcagcccggggagattgccaagtttggtctggtcgttcgagggacaggcccagacgaccgcgtggtcgccaactatgtacgaagcgaactccgacaacgcggcctgcaggacgtgcgtcccattggggaggacgaggtgtttctggacagcgtgtgtcttctaaacccgaacgtgagctccgagctggatgtgattaacacgaacgacgtggaagtgctggacgaatgtctggccgagtactgcacctcgctgcgaaccagcccgggtgtgctaatatccgggctgcgcgtgcgggcgcaagacagaatcatcgagttgtttgaacacccaacgatagtcaacgtttcctcgcactttgtgtataccccgtccccatacgtgttcgccctggcccaggcgcacctcccccggctcccgagctcgctggaggccctggtgagcggcctgtttgacggcatccccgccccacgccagccacttgacgcccacaacccgcgcacggatgtggttatcacgggccgccgcgccccacgacccatcgccgggtcgggggcggggtcggggggcgcgggcgccaagcgggccaccgtcagcgagttcgtgcaagtcaaacacattgaccgcgtgggccccgctggcgtttcgccggcgcctccgccaaacaacaccgactcgagttccctggtgcccggggcccaggattccgccccgcccggccccacgctaagggagctgtggtgggtgttttatgccgcagaccgggcgctggaggagccccgcgccgactctggcctcacccgcgaggaggtacgtgccgtacgtgggttccgggagcaggcgtggaaactgtttggctccgcgggggccccgcgggcgtttatcggggccgcgttgggcctgagccccctccaaaagctggccgtttactactatatcatccaccgagagaggcgcctgtcccccttccccgcgctagtccggctcgtaggccggtacacacagcgccacggcctgtacgtccctcggcccgacgacccagtcttggccgatgccatcaacgggctggttcgcgacgcgctggcggccggaaccacagccgagcagctcctcatgttcgaccttctccccccaaaggacgtgccggtgggaagcgacgtgcaggccgacagcaccgctctgctgcgctttatagaatcgcaacgtctcgccgtccccgggggggtgatctcccccgagcacgtcgcgtaccttggtgcgttcctgagcgtgctgtacgctggccgcgggcgcatgtccgcagcaacgcacaccgcgcggctgacaggggtgacctccctggtgctagcggtgggtgacgtggaccgtctttccgcgtttgaccgcggagcggcgggcgcggccagccgcacgcgggccgccgggtacctggatgtgcttcttaccgttcgtctcgctcgctccaaacacggacagtctgtgtaacagaccccaataaacgtatgtcgctaccacacccttgtgtgtcaatggacgcctctccgggggggaagggaaaacaaagaggggctgggggagcggcaccactggggcctgaacaaacaaacaaaccacagacacggttacagtttattcggtcgggcggataaacggccgaagccacgccccctttattcgcgtctccaaaaaaacgggacacttgtccggagaacctttaggatgccagccagggcggcggtaatcataaccacgcccagcgcagaggcggccagaaacccgggcgcaattgcggccacgggctgcgtgtcaaaggctagcaaatgaatgacggttccgtttggaaatagcaacaaggccgtggacggcacgtcgctcgaaaacacgctcggggcgccctccgtcggcccggcggcgatttgctgctgtgtgttgtccgtatccaccagcaacacagacatgacctccccggctggggtgtagcgcataaacacggcccccacgagccccaggtcgcgctggttttgggtgcgcaccagccgcttggactcgatatcccgggtggagccttcgcatgtcgcggtgaggtaggttaggaacagtgggcgtcggacgtcgacgccggtgagcttgtagccgatcccccggggcagaggggagtgggtgacgacgtagctggcgttgtgggtgatgggtaccaggatccgtggctcgacgttggcagactgccccccgcaccgatgtgaggcctcagggacgaaggcgcggatcagggcgttgtagtgtgcccagcgcgtcagggtcgaggcgaggccgtgggtctgctgggccaggacttcgaccggggtctcggatcgggtggcttgagccagcgcgtccaggataaacacgctctcgtctagatcaaagcgcagggaggccgcgcatggcgaaaagtggtccggaagccaaaagagggttttctggtggtcggcccgggccagcgcggtccggaggtcggcgttggtcgctgcggcgacgtcggacgtacacagggccgatgctatcagaaggctccggcgggcgcgttcccgctgcaccgccgaggggacgcccgccaagaacggctgccggaggacagccgaggcgtaaaatagcgcccggtggacgaccggggtggtcagcacgcggccccctagaaactcggcatacagggcgtcgatgagatgggctgcgctgggcgccactgcgtcgtacgccgaggggctatccagcacgaaggccagctgatagcccagcgcgtgtaatgccaagctctgttcgcgctccagaatctcggccaccaggtgctggagccgagcctctagctgcaggcgggccgtgggatccaagactgacacattaaaaaacacagaatccgcggcacagcccgcggccccgcgggcggccaacccggcaagcgcgcgcgagtgggccaaaaagcctagcaggtcggagaggcagaccgcgccgtttgcgtgggcggcgttcacgaaagcaaaacccgacgtcgcgagcagccccgttaggcgccagaagagaggggggcgcgggccctgctcggcgcccgcgtcccccgagaaaaactccgcgtatgcccgcgacaggaactgggcgtagttcgtgccctcctccgggtagccgcccacgcggcggagggcgtccagcgcggagccgttgtcggcccgcgtcagggaccctaggacaaagacccgataccgggggccgcccgggggcccgggaagagcccccggggggttttcgtccgcggggtccccgacccgatctagcgtctggcccgcggggaccaccatcacttccaccggagggctgtcgtgcatggatatcacgagccccatgaattcccgcccgtagcgcgcgcgcaccagcgcggcatcgcacccgagcaccagctcccccgtcgtccagatgcccacgggccacgtcgaggccgacggggagaaatacacgtacctacctggggatctcaacaggccccgggtggccaaccaggtcgtggacgcgttgtgcaggtgcgtgatgtccagctccgtcgtcgggtgccgccgggccccaaccggcggtcgggggggcggtgtatcacgcggcccgcttgggtggctcgccgtcgccacgttgtctccccgcgggaacgtcagggcctcggggtcagggacggccgaaaacgttacccaggcccgggaacgcagcaacacggaggcgactggattgtacaagagacccttaaggggggcgaccgaggggggaggctgggcggtcggctcgaccgtggtgggggcgggcaggctcgcgttcgggggccggccgagcaggtaggtcttcgggatgtaaagcagctggccggggtcccgcggaaactcggccgtggtgaccaatacaaaacaaaagcgctcctcgtaccagcgaagaaggggcagagatgccgtagtcaggtttagttcgtccggcggcgccagaaatccgcgcggtggtttttgggggtcgggggtgtttggcagccacagacgcccggtgttcgtgtcgcgccagtacatgcggtccatgcccaggccatccaaaaaccatgggtctgtctgctcagtccagtcgtggacctgaccccacgcaacgcccaaaataataacccccacgaaccataaaccattccccatgggggaccccgtccctaacccacggggcccgtggctatggcagggcttgccgccccgacgttggctgcgagccctgggccttcacccgaacttggggggtggggtggggaaaaggaagaaacgcgggcgtattggccccaatggggtctcggtggggtatcgacagagtgccagccctgggaccgaaccccgcgtttatgaacaaacgacccaacacccgtgcgttttattctgtctttttattgccgtcatagcgcgggttccttccggtattgtctccttccgtgtttcagttagcctcccccatctcccgggcaaacgtgcgcgccaggtcgcagatcgtcggtatggagccgggggtggtgacgtgggtctggaccatcccggaggtaagttgcagcagggcgtcccggcagccggcgggcgattggtcgtaatccaggataaagacgtgcatgggacggaggcgtttggccaagacgtccaaggcccaggcaaacacgttgtacaggtcgccgttgggggccagcaactcgggggcccgaaacagggtaaataacgtgtccccgatatggggtcgtgggcccgcgttgctctggggctcggcaccctggggcggcacggccgtccccgaaagctgtccccaatcctcccgccacgacccgccgccctgcagataccgcaccgtattggcaagcagcccgtaaacgcggcgaatcgcggccagcatagccaggtcaagccgctcgccggggcgctggcgtttggccaggcggtcgatgtgtctgtcctccggaagggcccccaacacgatgtttgtgccgggcaaggtcggcgggatgagggccacgaacgccagcacggcctggggggtcatgctgcccataaggtatcgcgcggccgggtagcacaggagggcggcgatgggatggcggtcgaagatgagggtgagggccgggggcggggcatgtgagctcccagcctcccccccgatatgaggagccagaacggcgtcggtcacggcataaggcatgcccattgttatctgggcgcttgtcattaccaccgccgcgtccccggccgatatctcaccctggtcgaggcggtgttgtgtggtgtagatgttcgcgattgtctcggaagcccccagcacctgccagtaagtcatcggctcgggtacgtagacgatatcgtcgcgcgaacccagggccaccagcagttgcgtggtggtggttttccccatcccgtgaggaccgtctatataaacccgcagtagcgtgggcattttctgctccaggcggacttccgtggcttcttgctgccggcgagggcgcaacgccgtacgtcggttgctatggccgcgagaacgcgcagcctggtcgaacgcagacgcgtgttgatggcaggggtacgaagccatacgcgcttctacaaggcgcttgccgaagaggtgcgggagtttcacgccaccaagatctgcggcacgctgttgacgctgttaagcgggtcgctgcagggtcgctcggtgttcgaggccacacgcgtcaccttaatatgcgaagtggacctgggaccgcgccgccccgactgcatctgcgtgttcgaattcgccaatgacaagacgctgggcggggtttgtgtcatcatagaactaaagacatgcaaatatatttcttccggggacaccgccagcaaacgcgagcaacgggccacggggatgaagcagctgcgccactccctgaagctcctgcagtccctcgcgcctccgggtgacaagatagtgtacctgtgccccgtcctggtgtttgtcgcccaacggacgctccgcgtcagccgcgtgacccggctcgtcccgcagaaggtctccggtaatatcaccgcagtcgtgcggatgctccagagcctgtccacgtatacggtccccatggagcctaggacccagcgagcccgtcgccgccgcggcggcgccgcccgggggtctgcgagcagaccgaaaaggtcacactctggggcgcgcgacccgcccgagtcagcggcccgccagttaccacccgccgaccaaacccccgcctccacggagggcgggggggtgcttaagaggatcgcggcgctcttctgcgtgcccgtggccaccaagaccaaaccccgagccgcctccgaatgagagtgtttcgttccttccccctccccccgcgtcagacaaaccctaaccaccgcttaagcggcccccgcgaggtccgaagactcatttggatccggcgggagccacccgacaacagcccccgggttttcccacgccagacgccggtccgctgtgccatcgcgccccctcatcccaccccccatcttgtccccaaataaaacaaggtctggtagttaggacaacgaccgcagttctcgtgtgttattttcgctctccgcctctcgcagatggacccgtactgcccatttgacgctctggacgtctgggaacacaggcgcttcatagtcgccgattcccgaaacttcatcacccccgagttcccccgggacttttggatgtcgcccgtctttaacctcccccgggagacggcggcggagcaggtggtcgtcctacaggcccagcgcacagcggctgccgctgccctggagaacgccgccatgcaggcggccgagctccccgtcgatatcgagcgccggttacgcccgatcgaacggaacgtgcacaagatcgcaggcgccctggaggcgctggagacggcggcggccgccgccgaagaggcggatgccgcgcgcggggatgagccggcgggtgggggcgacgggggggcgcccccgagtctggccgtcgcggagatggaggtccagatcgtgcgcaacgacccgccgctacgatacgacaccaacctccccgtggatctgctacacatggtgtacgcgggccgcggggcgaccggatcgtcgggggtggtgttcgggacctggtaccgcactatccaggaccgcaccatcacggactttcccctgaccacccgcagtgccgactttcgggacggccgtatgtccaagaccttcatgacggcgctggtactgtccctgcagtcgtgcggccggctgtatgtgggccagcgccactattccgccttcgagtgcgccgtgttgtgtctctacctgctgtaccgaaacacgcacggggccgccgacgatagcgaccgcgctccggtcacgttcggggatctgctgggccggctgccccgctacctggcgtgcctggccgcggtgatcgggaccgagggcggccggccacagtaccgctaccgcgacgacaagctccccaagacgcagttcgcggccggcgggggccgctacgaacacggagcgctggcgtcgcacatcgtgatcgccacgctgatgcaccacggggtgctcccggcggccccgggggacgtcccccgggacgcgagcacccacgttaaccccgacggcgtggcgcaccacgacgacataaaccgcgccgccgccgcgttcctcagccggggccacaacctattcctgtgggaggaccagactctgctgcgggcaaccgcgaacaccataacggccctgggcgttatccagcggctcctcgcgaacggcaacgtgtacgcggaccgcctcaacaaccgcctgcagctgggcatgctgatccccggagccgtcccttcggaggccatcgcccgtggggcctccgggtccgactcgggggccatcaagagcggagacaacaatctggaggcgctatgtgccaattacgtgcttccgctgtaccgggccgacccggcggtcgagctgacccagctgtttcccggcctggccgccctgtgtcttgacgcccaggcggggcggccggtcgggtcgacgcggcgggtggtggatatgtcatcgggggcccgccaggcggcgctggtgcgcctcaccgccctggaactcatcaaccgcacccgcacaaaccccacccccgtgggggaggttatccacgcccacgacgccctggcgatccaatacgaacaggggcttggcctgctggcgcagcaggcacgcattggcttgggctccaacaccaagcgtttctccgcgttcaacgttagcagcgactacgacatgttgtactttttatgtctggggttcattccacagtacctgtcggcggtttagtgggtggtgggcgaggggggagggggcattagggagaaagaacaagagcctccgttgggttttctttgtgcctgtactcaaaaggtcataccccgtaaacggcgggctccagtcccggcccggcggttggcgtgaacgcaacggcgggagctgggttagcgtttagtttagcattcgctctcgcctttccgcccgccccccgaccgttgcgccttttttttttttcgtccaccaaagtctctgtgggtgcgcgcatggcagccgatgccccgggagaccggatggaggagcccctgccagacagggccgtgcccatttacgtggctgggtttttggccctgtatgacagcggggactcgggcgagttggcattggatccggatacggtgcgtgcggccctgcctccggataacccactcccgattaacgtggaccaccgcgctggctgcgaggtggggcgggtgctggccgtggtcgacgacccccgcgggccgttttttgtgggactgatcgcctgcgtgcaactggagcgcgtcctcgagacggccgccagcgctgcgattttcgagcgccgcgggccgccgctctcccgggaggagcgcctgttgtacctgatcaccaactacctgccctcggtctccctggccacaaaacgcctggggggcgaggcgcaccccgatcgcacgctgttcgcgcacgtcgcgctgtgcgcgatcgggcggcgcctcggcactatcgtcacctacgacaccggtctcgacgccgccatcgcgccctttcgccacctgtcgccggcgtctcgcgagggggcgcggcgactggccgccgaggccgagctcgcgctgtccggacgcacctgggcgcccggcgtggaggcgctgacccacacgctgctttccaccgccgttaacaacatgatgctgcgggaccgctggagcctggtggccgagcggcggcggcaggccgggatcgccggacacacctacctccaggcgagcgaaaaattcaaaatgtggggggcggagcctgtttccgcgccggcgcgcgggtataagaacggggccccggagtccacggacataccgcccggctcgatcgctgccgcgccgcagggtgaccggtgcccaatcgtccgtcagcgcggggtcgcctcgcccccggtactgccccccatgaaccccgttccggcatcgggcaccccggcccccgcgccgcccggcgacgggagctacctgtggatcccggcctcccattacaaccagctcgtcgccggccacgccgcgccccaaccccagccgcattccgcgtttggtttcccggctgcggcgggggccgtggcctatgggcctcacggcgcgggtctttcccagcattaccctccccacgtcgcccatcagtatcccggggtgctgttctcgggacccagcccactcgaggcgcagatagccgcgttggtgggggccatagccgcggaccgccaggcgggcggtcagacggccgcgggagaccctggggtccgggggtcgggaaagcgtcgccggtacgaggcggggccgtcggagtcctactgcgaccaggacgaaccggacgcggactacccgtactaccccggggaggctcgaggcgggccgcgcggggtcgactctcggcgcgcggcccgccagtctcccgggaccaacgagaccatcacggcgctgatgggggcggtgacgtctctgcagcaggaactggcgcacatgcgggctcggaccagcgccccctatggaatgtacacgccggtggcgcactatcgccctcaggtgggggagccggaaccaacaacgacccacccggccctttgtcccccggaggccgtgtatcgccccccaccacacagcgccccctacggtcctccccagggtccggcgtcccatgcccccactcccccgtatgccccagctgcctgcccgccaggcccgccaccgcccccatgtccttccacccagacgcgcgcccctctaccgacggagcccgcgttcccccccgccgccaccggatcccaaccggaggcatccaacgcggaggccggggcccttgtcaacgccagcagcgcagcacacgtggacgttgacacggcccgcgccgccgatttgttcgtctctcagatgatgggggcccgctgattcgccccggtctttggtaccatgggatgtcttactgtatatctttttaaataaaccaggtaataccaaataagacccattggtgtatgttctttttttattgggaggcgcgggtaggcgggtagctttacaatgcaaaagccttcgacgtggaggaaggcgtggggggggaatcggcactgaccaagggggtccgttttgtcacgggaaaggaaagaggaaacaggccgcggacacccgggggagtttatgtgttcccttttctttcttcccacacacacaaaaggcgtaccaaacaaacaaaccaaaagatgcacatgcggtttaacacccgtggtttttatttacaacaaaccccccgtcacaggtcgtcctcgtcggcgtcaccgtctttgttgggaacttgggtgtagttggtgttgcggcgcttgcgcatgaccatgtcggtgaccttggcgctgagcagcgcgctcgtgcccttcttcttggccttgtgttccgtgcgctccatggcagacaccagggccatgtaccgtatcatctcccgggcctcggctagcttggcctcgtcaaagtcgccgccctcctcgccctccccggacgcgtccgggttggtggggttcttgagctccttggtggttagcgggtacagggccttcatggggttgctctgcagccgcatgacgtagcgaaaggcgaagaaagccgccgccaggccggccaggaccaacagacccacggccagcgccccaaaggggttggacatgaaggaggacacgcccgacacggccgataccacgccgcccacgatgcccatcaccaccttgccgaccgcgcgccccaggtcgcccatcccctcgaagaacgcgcccaggcccgcgaacatggcggcgttggcgtcggcgtggatgaccgtgtcgatgtcggcgaagcgcaggtcgtgcagctggttgcggcgctggacctccgtgtagtccagcaggccgctgtccttgatctcgtggcgggtgtacacctccagggggacaaactcgtgatcctccagcatggtgatgttgaggtcgatgaaggtgctgacggtggtgatgtcggcgcggctcagctggtgggagtacgcgtactcctcgaagtacacgtagcccccgccgaaggtgaagtagcgccggtgtcccacggtgcacggctcgatcgcatcgcgcgtcagccgcagctcgttgttctcccccagctgcccctcgaccaacgggccctggtcttcgtaccgaaagctgaccagggggcggctgtagcaggccccgggccgcgagctgatgcgcatcgagttttggacgatcacgttgtccgcggcgaccggcacgcacgtggagacggccatcacgtcgccgagcatccgcgcgctcacccgccggcccacggtggccgaggcgatggcgttggggttcagcttgcgggcctcgttccacagggtcagctcgtgattctgcagctcgcaccacgcgatggcaacgcggcccaacatatcgttgacatggcgctgtatgtggttgtacgtaaactgcagccgggcgaactcgatggaggaggtggtcttgatgcgctccacggacgcgttggcgctggccccgggcggcgggggcgtggggtttgggggcttgcggctctgctctcggaggtgttcccgcacgtacagctccgcgagcgtgttgctgagaaggggctggtacgcgatcagaaagcccccattggccaggtagtactgcggctggcccaccttgatgtgcgtcgcgttgtacctgcgggcgaagatgcggtccatggcgtcgcgggcgtccttgccgatgcagtcccccaggtccacgcgcgagagcgggtactcggtcaggttggtggtgaaggtggtggatatggcgtcggaggagaatcggaaggagccgccgtactcggagcgcagcatctcgtccacctcctgccacttggtcatggtgcagaccgacgggcgctttggcacccagtcccaggccacggtgaacttgggggtcgtgagcaggttccgggtggtcggcgccgtggcccgggccttggtggtgaggtcgcgcgcgtagaagccgtcaacctgcttgaagcggtcggcggcgtagctggtgtgttcggtgtgcgacccctcccggtagccgtaaaacggggacatgtacacaaagtcgccagtcgccagcacaaactcgtcgtacgggtacaccgagcgcgcgtccacctcctcgacgatgcagtttaccgtcgtcccgtaccggtggaacgcctccacccgcgaggggttgtacttgaggtcggtggtgtgccagccccggctcgtgcgggtcgcggcgttggccggtttcagctccatgtcggtctcgtggtcgtcccggtgaaacgcggtggtctccaggttgttgcgcacgtacttggccgtggaccgacagacccccttggcgttgatcttgtcgatcacctcctcgaaggggacgggggcgcggtcctcaaagatccccataaactgggagtagcggtggccgaaccacacctgcgaaacggtgacgtctttgtagtacatggtggccttgaacttgtacggggcgatgttctccttgaagaccaccgcgatgccctccgtgtagttctgaccctcgggccgggtcgggcagcggcgcggctgctcgaactgcaccaccgtggcgcccgtggggggtgggcacacgtaaaagtttgcatcggtgttctccgccttgatgtcccgcaggtgctcgcgcagggtggcgtggcccgcggcgacggtcgcgttgtcgccggcggggcgcggcggcggtgggtttttcggttttttgttcttcttcggtttcgtgtcccccgttggggcggggccaggggcgggcggcgccggagtggcaggtcccccgttcgccgcctgggtcgcggccgcgaccccaggcgtgccgggggaactcggagccgccgacgccaccaggacccccagcgtcaaccccaagagcgcccatacgacgaaccaccggcacccccgcgcgggggcgccctggcgcatggcgggactacgggggcccgtcgtgccccccgtcaggtagcctgggggcgaggtgctggaggaccgagtagaggatcgagaaaacgtctcggtcgtagaccacgaccgaccgggggccgatacagccgtcgggggcgctctcgacgatggccaccagcggacagtcggagtcgtacgtgagatatacgccgggcgggtaacggtaacgaccttcggaggtcgggcggctgcagtccgggcggcgcaactcgagctccccgcaccggtagaccgaggcaaagagtgtggtggcgataatcagctcgcgaatatatcgccaggcggcgcgctgagtgggcgttattccggaaatgccgtcaaaacagtaaaacctctgaaattcgctgacggcccaatcagcacccgagccccccgcccccatgatgaaccgggcgagctcctccttcaggtgcggcaggagccccacgttctcgacgctgtaatacagcgcggtgttggggggctgggcgaagctgtgggtggagtgatcaaagaggggcccgttgacgagctcgaagaagcgatgggtgatgctggggagcagggccgggtccacctggtgtcgcaggagagacgctcgcatgaaccggtgcgcgtcgaacacgcccggcgccgagcggttgtcgatgaccgtgcccgcgcccgccgtcagggcgcagaagcgcgcgcgcgccgcaaagccgttggcgaccgcggcgaacgtcgcgggcagcacctcgccgtggacgctgacccgcagcatcttctcgagctccccgcgctgctcgcggacgcagcgccccaggctggccaacgaccgcttcgtcaggcggtccgcgtacagccgccgtcgctcccgcacgtccgcggccgcttgcgtggcgatgtccccccacgtctcgggcccctgccccccgggcccgcggcgacggtcttcgtcctcgcccccgcccccgggagctcccaacccccgtgccccttcctctacggcgacacggtccccgtcgtcgtcggggcccgcgccgcccttgggcgcgtccgccgcgccccccgcccccatgcgcgccagcacgcgacgcagcgcctcctcgtcgcactgttcggggctgacgaggcgccgcaagagcggcgtcgtcaggtggtggtcgtagcacgcgcggatgagcgcctcgatctgatcgtcgggtgacgtggcctgaccgccgattattagggcgtccaccatatccagcgccgccaggtggctcccgaacgcgcgatcgaaatgctccgcccgccgcccgaacagcgccagttccacggccaccgcggcggtctcctgctgcaactcgcgccgcgccagcgcggtcaggttgctggcaaacgcgtccatggtggtctggccggcgcggtcgccggacgcgagccagaatcgcaattcgctgatggcgtacaggccgggcgtggtggcctgaaacacgtcgtgcgcctccagcagggcgtcggcctccttgcggaccgagtcgttctcgggcgacgggtggggctgcccgtcgccccccgcggtccgggccagcgcatggtccaacacggagagcgcccgcgcgcggtcggcgtccgacagcccggcggcgtggggcaggtaccgccgcagctcgttggcgtccagccgcacctgcgcctgctgggtgacgtggttacagatacggtccgccaggcggcgggcgatcgtcgccccctggttcgccgtcacacacagttcctcgaaacagaccgcgcaggggtgggacgggtcgctaagctccggggggacgataaggcccgaccccaccgcccccaccataaactcccgaacgcgctccagcgcggcggtggcgccgcgcgagggggtgatgaggtggcagtagtttagctgctttagaaagttctcgacgtcgtgcaggaaacacagctccatatggacggtcccgccatacgtatccagcctgacccgttggtgatacggacagggtcgggccaggcccatggtctccgtgaaaaacaccgcgacgtctcccgcggtcgcgaacgtctccaggctgcccaggagccgctcgccctcgcgccacgcgtactctagcagcaactccagggtgaccgacagcggggtgagaaaggccccggcctgggcctccaggcccggcctcagacgacgccgcagcgcccgcacctgaagcgcgttcagcttcagttgggggagcttcccccgtccgatgtgggggtcgcaccgccggagcagctctatctgaaacacataggtctgcacctgtccgagcagggctaacaacttttgacgggccacggtgggctcggacaccggggcggccatctcgcggcgccgatctgtaccgcggccggagtatgcggtggaccgaggcggtccgtacgctacccggcgtctggctgagccccggggtccccctattcggggcggcctcccgcgggcccgccgaccggcaagccgggagtcggcggcgcgtgcgtttctgttctattcccagacaccgcggagaggaatcacggcccgcccagagatatagacacggaacacaaacaagcacggatgtcgtagcaataatttattttacacacattccccgccccgccctaggttcccccaccccccaacccctcacagcatatccaacgtcaggtctccctttttgtcggggggcccctccccaaacgggtcatccccgtggaacgcccgtttgcggccggcaaatgccggtcccggggcccccgggccgccgaacggcgtcgcgttgtcgtcctcgcagccaaaatccccaaagttaaacacctccccggcgttgccgagttggctgactagggcctcggcctcgtgcgccacctccagggccgcgtccgtcgaccactcgccgttgccgcgctccagggcacgtgcggtcagctccatcatctcctcgcttaggtactcgtcctccaggagcgccagccagtcctcgatctgcagctgttgggtgcggggccccaggcttttcacggtcgccacgaacacgctactggcgacggccgccccgccctcggagataatgccccggagctgctcgcacagcgagctttcgtgcgctccgccgccgaggctcgaggccgcgcacacaaacccggcccggggacaggccaggacgaacttgcgggtgcggtcaaaaataaggagcgggcacgcgtttttgccgcccatcaggctggcccagttcccggcctgaaacacacggtcgttgccggccatgccgtagtatttgctgatgctcaaccccaacacgaccatggggcgtgccgccatgacgggccgcagcaggttgcagctggcgaacatggaggtccacgcgcccggatgcgcgtccacggcgtccatcagcgcgcgggccccggcctccaggcccgccccgccctgcgcggaccacgcggccgccgcctgcacgctggggggacggcgggaccccgcgatgatggccgtgagggtgttgatgaagtacgtcgagtgatcgcagtaccgcagaatctggtttgccatgtagtacatcgccagctcgctcacgttgttgggggccaggttaataaagttgatcgcgccgtagtccagggaaaactttttaatgaacgcgatggtctcgatgtcctcgcgcgacaggagccgggcgggaagctggttgcgttggagggccgtccagaaccactgcgggttcggctggttggaccccgggggcttgccgttggggaagatggccgcgtggaactgcttcagcagaaagcccagcggtccgaggaggatgtccacgcgcttgtcgggcttctggtaggcgctctggaggctggcgacccgcgccttggcggcctcggacgcgttggcgctcgcgcccgcgaacaacacgcggctcttgacgcgcagctccttgggaaaccccagggtcacgcgggcaacgtcgccctcgaagctgctctcggcgggggccgtctggccggccgtcaggctgggggcgcagatagccgcaccctccgagagcgcgaccgtcagcgttttggccgacagaaacccgttgttaaacatgtccatcacgcgccgccgcagcaccggttggaattgattgcgaaagttgcgcccctcgaccgactgcccggcgaacaccccgtggcactggctcagggccaggtcctggtacacggcgaggttggatcgccgcccgagaagctgaagcagggggcacggcccgcacgcgtacgggtccagcgtcagggacatggcgtggttggcctcgcccagaccgtcgcgaaacttgaagttcctcccctccaccaggttgcgcatcagctgctccacctcgcggtccacgacctgcctgacgttgttcaccaccgtatgcagggcctcgcggttggtgatgatggtctccagccgccccatggccgtggggaccgcctggtccacgtactgcagggtctcgagttcggccatgacgcgctcggtcgccgcgcggtacgtctcctgcatgatggtccgggcggtctcggatccgtccgcgcgcttcagggccgagaaggcggcgtagtttcccagcacgtcgcagtcgctgtacatgctgttcatggtcccgaagacgccgatggctccgcgggcggcgctggcgaacttgggatggcgcgcccggaggcgcatgagcgtcgtgtgtacgcaggcgtggcgcgtgtcgaaggtgcacaggttacagggcacgtcggtctggttggagtccgcgacgtatcgaaacacgtccatctcctggcgcccgacgatcacgccgccgtcgcagcgctccaggtaaaacagcatcttggccagcagcgccggggaaaacccacacagcatggccaggtgctcgccggcaaattcctgggttccgccgacgaggggcgcggtgggccgaccctcgaacccgggcaccacgtgtccctcgcggtccacctgtgggttggccgccacgtgggtcccgggcacgaggaagaagcggtaaaaggagggtttgctgtggtcctttgggtccgccgggccggcgtcgtccacctcggtgagatggagggccgagttggtgctaaataccatggcccccacgagtcccgcggcgcgcgccaggtacgccccgacggcgttggcgcgggccgcggccgtgtcctggccctcgaacagcggccacgcggagatgtcggtgggcggctcgtcaaagacggccatcgacacgatagactcgagggccagggcggcgtctccggccatgacggaggccaggcgctgttcgaacccgcccgcagggcccttgccgccgccgtcgcgcccgccccgcggggtcttaccctggctggcttcgaaggccgtgaacgtaatgtcggcggggagggcggcgccctcgtggttttcgtcaaacgccaggtgggcggccgcgcgggccacggcgtccacgtttcggcatcgcagtgccacggcggcgggtcccacgaccgcctcgaacaggaggcggtggagggggcggttaaaaaacggaagcgggtaggtaaaattctccccgatcgatcggtggttggcgttgaacggctctgcgatgacacggctaaaatccggcatgaacagctgcaacgggtacacgggtatgcggtgcacctccgccccgcctatggttaccttgtccgagcctcccaggtgcagaaaggtgttgttgatgcacacggcctccttgaagccctcggtaacgaccagatacaggagggcgcggtccgggtccaggccgaggcgctcacacagcgcctcccccgtcgtctcgtgtttgaggtcgccgggccggggggtgtagtccgaaaagccaaaatggcggcgtgcccgctcgcagagtcgcgtcaggttcggggcctgggtgctggggtccaggtgccggccgccgtgaaagacgtacacggacgagctgtagtgcgagggcgtcagtttcagggacaccgcggtacccccgagccccgtcgtgcgagaacccacgaccacggccacgttggcctcaaagccgctctccacggtcaggcccacgaccaggggcgccacggcgacgtcggcatcgccgctgcgcgccgacagtaacgccagaagctcgatgccttcggacggacacgcgcgagcgtacacgtatcccaggggcccgggggggaccttgatggtggttgccgtcttgggctttgtctccatgtccttctgtcaatcggtccgcgaacggaggtaatcccggcacgacgacggacgcccgacaaggtatgtctcccgagcgtcaaaatccgggggggggggcggcgacggtcaaggggagggttggagaccggggttggggaatgaatccctacccttcaccgacaaccccccgggtaatcacggggtgccgatgaaccccggcggccggcaacgcggggtccctgcgagaggcacagatgcttacggtcaggtgctccgggtcgggtgcgtctggtatgcggttggtatatgtacactttacctgggggcgtgcctggccgccccagcccctcccacgccctgcgcgtcatcagccggtgggcgtggccgctattataaaaaaagtgagaacgcgaagcgttcgcactttgtcctaataatatatatattattaggacaaagtgcgaacgcttcgcgttctcactttttttataatagcggccacgcccaccggctacgtcacgctcctgtcggccgccggcggtccataagcccggccggccgggccgacgcgaataaaccgggccgccggccggggcgccgcgcagcagctcgccgcccggatccgccagacaaacaaggcccttgcacatgccggcccgggcgagcctgggggtccggtaattttgccatcccacccaagcggctttttgggtttttctcttcccccctccccacatcccccctctttaggggttcgggtggtaacaaccgcgatgttttccggtggcggcggcccgctgtcccccggaggaaagtcggcggccagggcggcgtccgggttttttgcgcccgccggccctcgcggagccggccggggacccccgccttgcttgaggcaaaacttttacaacccctacctcgccccagtcgggacgcaacagaagccgaccgggccaacccagcgccatacgtactatagcgaatgcgatgaatttcgattcatcgccccgcgggtgctggacgaggatgcccccccggagaagcgcgccggggtgcacgacggtcacctcaagcgcgcccccaaggtgtactgcgggggggacgagcgcgacgtcctccgcgtcgggtcgggcggcttctggccgcggcgctcgcgcctgtggggcggcgtggaccacgccccggcggggttcaaccccaccgtcaccgtctttcacgtgtacgacatcctggagaacgtggagcacgcgtacggcatgcgcgcggcccagttccacgcgcggtttatggacgccatcacaccgacggggaccgtcatcacgctcctgggcctgactccggaaggccaccgggtggccgttcacgtttacggcacgcggcagtacttttacatgaacaaggaggaggtcgacaggcacctacaatgccgcgccccacgagatctctgcgagcgcatggccgcggccctgcgcgagtccccgggcgcgtcgttccgcggcatttccgcggaccacttcgaggcggaggtggtggagcgcaccgacgtgtactactacgagacgcgccccgctctgttttaccgcgtctacgtccgaagcgggcgcgtgctgtcgtacctgtgcgacaacttctgcccggccatcaagaagtacgagggtggggtcgacgccaccacccggttcatcctggacaaccccgggttcgtcaccttcggctggtaccgtctcaaaccgggccggaacaacacgctagcccagccgcgggccccgatggccttcgggacatccagcgacgtcgagtttaactgtacggcggacaacctggccatcgaggggggcatgagcgacctaccggcatacaagctcatgtgcttcgatatcgaatgcaaggcggggggggaggacgagctggcctttccggtggccgggcacccggaggacctggtcatccagatatcctgtctgctctacgacctgtccaccaccgccctggagcacgtcctcctgttttcgctcggttcctgcgacctccccgaatcccacctgaacgagctggcggccaggggcctgcccacgcccgtggttctggaattcgacagcgaattcgagatgctgttggccttcatgacccttgtgaaacagtacggccccgagttcgtgaccgggtacaacatcatcaacttcgactggcccttcttgctggccaagctgacggacatttacaaggtccccctggacgggtacggccgcatgaacggccggggcgtgtttcgcgtgtgggacataggccagagccacttccagaagcgcagcaagataaaggtgaacggcatggtgaacatcgacatgtacgggattataaccgacaagatcaagctctcgagctacaagctcaacgccgtggccgaagccgtcctgaaggacaagaagaaggacctgagctatcgcgacatccccgcctactacgccgccgggcccgcgcaacgcggggtgatcggcgagtactgcatacaggattccctgctggtgggccagctgttttttaagtttttgccccatctggagctctcggccgtcgcgcgcttggcgggtattaacatcacccgcaccatctacgacggccagcagatccgcgtctttacgtgcctgctgcgcctggccgaccagaagggctttattctgccggacacccaggggcgatttaggggcgccgggggggaggcgcccaagcgtccggccgcagcccgggaggacgaggagcggccagaggaggagggggaggacgaggacgaacgcgaggagggcgggggcgagcgggagccggagggcgcgcgggagaccgccggccggcacgtggggtaccagggggccagggtccttgaccccacttccgggtttcatgtgaaccccgtggtggtgttcgactttgccagcctgtaccccagcatcatccaggcccacaacctgtgcttcagcacgctctccctgagggccgacgcagtggcgcacctggaggcgggcaaggactacctggagatcgaggtgggggggcgacggctgttcttcgtcaaggctcacgtgcgagagagcctcctcagcatcctcctgcgggactggctcgccatgcgaaagcagatccgctcgcggattccccagagcagccccgaggaggccgtgctcctggacaagcagcaggccgccatcaaggtcgtgtgtaactcggtttacgggttcacgggagtgcagcacggactcctgccgtgcctgcacgttgccgcgacggtgacgaccatcggccgcgagatgctgctcgcgacccgcgagtacgtccacgcgcgctgggcggccttcgaacagctcctggccgatttcccggaggcggccgacatgcgcgcccccgggccctattccatgcgcatcatctacggggacacggactccatctttgtgctgtgccgcggcctcacggccgccgggctgacggccgtgggcgacaagatggcgagccacatctcgcgcgcgctgtttctgtcccccatcaaactcgagtgcgaaaagacgttcaccaagctgctgctgatcgccaagaaaaagtacatcggcgtcatctacgggggtaagatgctcatcaagggcgtggatctggtgcgcaaaaacaactgcgcgtttatcaaccgcacctccagggccctggtcgacctgctgttttacgacgataccgtatccggagcggccgccgcgttagccgagcgccccgcagaggagtggctggcgcgacccctgcccgagggactgcaggcgttcggggccgtcctcgtagacgcccatcggcgcatcaccgacccggagagggacatccaggactttgtcctcaccgccgaactgagcagacacccgcgcgcgtacaccaacaagcgcctggcccacctgacggtgtattacaagctcatggcccgccgcgcgcaggtcccgtccatcaaggaccggatcccgtacgtgatcgtggcccagacccgcgaggtagaggagacggtcgcgcggctggccgccctccgcgagctcgacgccgccgccccaggggacgagcccgccccccccgcggccctgccctccccggccaagcgcccccgggagacgccgttgcatgccgaccccccgggaggcgcgtccaagccccgcaagctgctggtgtccgagctggccgaggatcccgcatacgccattgcccacggcgtcgccctgaacacggactattacttctcccacctgttgggggcggcgtgcgtgacattcaaggccctgtttgggaataacgccaagatcaccgagagtctgttaaaaaggtttattcccgaagtgtggcaccccccggacgacgtggccgcgcggctccgggccgcagggttcggggcggtgggtgccggcgctacggcggaggaaactcgtcgaatgttgcatagagcctttgatactctagcatgagccccccgtcgaagctgatgtccctcattttacaataaatgtctgcggccgacacggtcggaatctccgcgtccgtgggtttctctgcgttgcgccggaccacgagcacaaacgtgctctgccacacgtgggcgacgaaccggtaccccgggcacgcggtgagcatccggtctatgagccggtagtgcaggtgggcggacgtgccgggaaagatgacgtacagcatgtggcccccgtaagtggggtccgggtaaaacaacagccgcgggtcgcacgccccgcctccgcgcaggatcgtgtggacgaaaaaaagctcgggttggccaagaatcccggccaagaggtcctggaggggggcgttgtggcggtcggccaacacgaccaaggaggccaggaaggcgcgatgctcgaatatcgtgttgatctgctgcacgaaggccaggattagggcctcgcggctggtggcggcgaaccgcccgtctcccgcgttgcacgcgggacagcaacccccgatgcctaggtagtagcccatcccggagagggtcaggcagttgtcggccacggtctggtccagacagaagggcagcgagacgggagtggtcttcaccaggggcaccgagagcgagcgcacgatggcgatctcctcggagggcgtctgggcgagggcggcgaaaaggccccgatagcgctggcgctcgtgtaaacacagctcctgtttgcgggcgtgaggcggcaggctcttccgggaggcccgacgcaccacgcccagagtcccgccggccgcagaggagcgcgaccgccggcgctccttgccgtgatagggcccgggccgggagccgcggcgatgggggtcggtgtcatacataggtacacagggtgtgctccagggacaggagcgagatcgagtggcgtctaagcagcgcgcccgcctcacggacaaatgtggcgagcgcggtgggctttggtacaaatacctgatacgtcttgaaggtgtagatgagggcacgcaacgctatgcagacacgcccctcgaactcgttcccgcaggccagcttggccttgtggagcagcagctcgtcgggatgggtggcggggggatggccgaacagaacccaggggtcaacctccatctccgtaatggcgcacatggggtcacagaacatgtgcttaaagatggcctcgggccccgcggcccgaagcaggctcacaaaccggcccccgtccccgggctgcgtctcggggtcagcctcgagctggtcgacgacgggtacgatacagtcgaagaggctcgtgttgttttccgagtagcggaccacggaggcccggagtctgcgcagggccagccagtaagcacgcaccagtaacaggttacacagcaggcattctccgccggtgcgcccgcgcccccggccgtgtttcagcacggtggccatcagagggcccaggtcgaggtcgggctgggcatcgggttcggtaaactgcgcaaagcgcggagccacgtcgcgcgtgcgtgccccgcgatgcgcttcccaggactggcggaccgtggcgcgacgggcctccgcggcagcgcgcagctggggccccgactcccagacggcgggggtgccggcgaggagcagcaggaccagatccgcgtacgcccacgtatccggcgactcctccggctcgcggtccccggcgaccgtctcgaattccccgttgcgagcggcggcgcgcgtacagcagctgtccccgcccccgcgccgaccctccgtgcagtccaggagacgggcgcaatccttccagttcatcagcgcggtggtgagcgacggctgcgtgccggatcccgccgaccccgccccctcctcgcccccggaggccaaggttccgatgagggcccgggtggcagactgcgccaggaacgagtagttggagtactgcaccttggcggctcccggggagggcgagggcttgggttgcttctgggcatgccgcccgggcaccccgccgtcggtacggaagcagcagtggagaaaaaagtgccggtggatgtcgtttatggtgagggcaaagcgtgcgaaggagccgaccagggtcgccttcttggtgcgcagaaagtggcggtccatgacgtacacaaactcgaacgcggccacgaagatgctagcggcgcagtggggcgcccccaggcatttggcacagagaaacgcgtaatcggccacccactgaggcgagaggcggtaggtttgcttgtacagctcgatggtgcggcagaccagacagggccggtccagcgcgaaggtgtcgatggccgccgcggaaaagggcccggtgtccaaaagcccctccccacagggatccgggggcgggttgcggggtcctccgcgcccgcccgaaccccctccgtcgcccgcccccccgcgggcccttgagggggcggtgaccacgtcggcggcgacgtcctcgtcgagcgtaccgacgggcggcacacctatcacgtgactggccgtcaggagctcggcgcagagagcctcgttaagagccaggaggctgggatcgaaggccacatacgcgcgctcgaacgcccccgccttccagctgctgccgggggactcttcgcacaccgcgacgctcgccaggaccccggggggcgaagttgccatggctgggcgggaggggcgcacgcgccagcgaactttacgggacacaatccccgactgcgcgctgcggtcccagaccctggagagtctagacgcgcgctacgtctcgcgagacggcgcgcatgacgcggccgtctggttcgaggatatgacccccgccgagctggaggttgtcttcccgactacggacgccaagctgaactacctgtcgcggacgcagcggctggcctccctcctgacgtacgccgggcctataaaagcgcccgacgacgccgccgccccgcagaccccggacaccgcgtgtgtgcacggcgagctgctcgcccgcaagcgggaaagattcgcggcggtcattaaccggttcctggacctgcaccagattctgcggggctgacgcgcgtgctgttgggcgggacggttcgcgaaccctttggtgggtttacgcgggcacgcacgctcccatcgcgggcgccatggcgggactgggcaagccctacaccggccacccaggtgacgccttcgagggtctcgttcagcgaattcggcttatcgtcccatctacgttgcggggcggggacggggaggcgggcccctactctccctccagcctcccctccaggtgcgcctttcagtttcatggccatgacgggtccgacgagtcgtttcccatcgagtatgtactgcggcttatgaacgactgggccgaggtcccgtgcaacccttacctgcgcatacagaacaccggcgtgtcggtgctgtttcaggggttttttcatcgcccacacaacgcccccgggggcgcgattacgccagagcggaccaatgtgatcctggggtccaccgagacgacggggttgtccctcggcgacctggacaccatcaaggggcggctcggcctggatgcccggccgatgatggccagcatgtggatcagctgctttgtgcgcatgccccgcgtgcagctcgcgtttcggttcatgggccccgaagatgccggacggacgagacggatcctgtgccgcgccgccgagcaggctattacccgtcgccgccgaacccggcggtcccgggaggcgtacggggccgaggccgggctgggggtggccggaacgggtttccgggccaggggggacggttttggcccgctccccttgttaacccaagggccctcccgcccgtggcaccaggccctgcggggtcttaagcacctacggattggcccccccgcgctcgttttggcggcgggactcgtcctgggggccgctatttggtgggtggttggtgctggcgcgcgcctataaaaaaggacgcaccgccgccctaatcgccagtgcgttccggacgccttcgccccacacagccctcccgaccgacacccccatatcgcttcccgacctccggtcccgatggccgtcccgcaatttcaccgccccagcaccgttaccaccgatagcgtccgggcgcttggcatgcgcgggctcgtcttggccaccaataactctcagtttatcatggataacaaccacccacacccccagggcacccaaggggccgtgcgggagtttctccgcggtcaggcggcggcactgacggaccttggtctggcccacgcaaacaacacgtttaccccgcagcctatgttcgcgggcgacgcaccggccgcctggttgcggcccgcgtttggcctgcggcgcacctattcaccttttgtcgttcgagaaccttcgacgcccgggaccccgtgaggcccagggagttccttctggggtgttttaatcaataaaagaccacaccaacgcacgagccttgcgtttaatgtcgtgtttattcaagggagtgggatagggttcgacggttcgaaacttaacacaccaaataatcgagcgcgtctagcccagtaacatgcgcacgtgatgtaggctggtcagcacggcgtcgctgtgatgaagcagcgcccggcgggtccgctgtaactgctgttgtaggcggtaacaggcgcggatcagcaccgccagggcgctacgaccggtgcgttgcacgtagcgtcgcgacagaactgcgtttgccgatacgggcggggggccgaattgtaagcgcgtcacctcttgggagtcatcggcggataacgcactgaatggttcgttggttatgggggagtgtggttccccagggagtgggtcgagcgcctcggcctcggaatccgagaggaacaacgaggtggcgtcggagtcttcgtcgtcagagacatacagggtctgaagcagcgacacgggcgggggggtagcgtcgatgtgtagcgcgagggaggatgcccacgaagacaccccagacaaggagctgcccgtgcgtggatttgtggaagacgcggaagccgggacggatgggcggttttgcggtgcccggaaccgaaccgccggatactccccgggtgctacatgcccgttttggggctggggttggggctggggttggggctggggttggggctggggttggggctggggttggggctggggttggggttggggttggggctggggttggggttggggctggggctggggctggggctggggctggggctggggctggggctggggctggggctggggctggggctggggctggggctggggctggggctggggttggggcgcggacaggcggctgacggtcaaatgcccccgggggcgcgcagatgtggtgggcgtggccaccggctgccgtgtagtggggcggcgggaaaccgggcctccgggcgtaacaccgccctccagcgtcaagtatgtggggggcgggcctgacgtcgggggcggggtgacgggttggaccgcgggaggcgggggagagggacctgcgggagaggatgaggtcggctcggccgggttgcggcctaaaacaggggccgtggggtcggcggggtcccagggtgaagggagggattcccgcgattcggacagcgacgcgacagcggggcgcgtaaggcgccgctgcggcccgcctacgggaaccctggggggggttggcgcgggacccgaggttagcggggggcggcggttttcgcccccgggcaaaaccgtgccggttgcgaccgggggcggaacgggatcgatagggagagcgggagaagcctggccggcggactggggaccgagcgggaggggcacaccagacaccaaagcgtggggcgctggctctgggggtttgggaggggccggggggcgcgcgaaatcggtaaccggggcgaccgtgtcggggagggcaggcggccgccaaccctgggtggtcgcggaagcctgggtggcgcgcgccagggagcgtgcccggcggtgtcggcgcgcgcgcgacccggacgaagaagcggtagaagcgcgggaggaggcgggggggcggggggcggtggcatcggggggcgccggggaactttggggggacggcaagcgccggaagtcgtcgcgggggcccacgggcgccggccgcgtgctttcggccgggacgcccggtcgtgcttcgcgagccgtgactgccggcccagggggccgcggtgcacactgggacgtggggacggactgatcggcggtgggcgaaagggggtccggggcaaggaggggcgcggggccgccggagtcgtcagacgcgagctcctccaggccgtgaatccatgcccacatgcgaggggggacgggctcgccgggggtggcgtcggtgaatagcgtgggggccaggcttccgggccccaacgagccctccgccccaacaaggtccgccgggccgggggtcgggttcgggaccgaggggctctggtcgtcgggggcgcgctggtacaccggatgccccgggaatagctcccccgacaggagggaggcgtcgaacggccgcccgaggatagctcgcgcgaggaaggggtcctcgtcggtggcgctcgcggcgaggacgtcctcgccgcccgccacaaacgggagctcctcggtggcctcgctgccaacaaaccgcatgtcgggggggccgggggggtccgggttttcccacaacaccgcgaccggggtcatggagatgtccacgagcaccaggcacggcgggccccgggcgaggggccgctcggcgatgagcgcggacaggcgcgggagctgtgccgccagacacgcgttttcgatcgggttaaggtcggcgtgcaggaggcggacggcccacgtctcgatgtcggacgacacggcatcgcgcaaggcggcgtccggcccgcgagcgcgtgagtcaaacagcgtgaggcacagctccagttccgactcgcgggaaaaggccgtggtgttgcggagcgccacgacgacgggcgcgcccaggagcactgccgccagcaccaggtccatggccgtaacgcgcgccgcgggggtgcggtgggtggcggcggccggcacggcgacgtgctggcccgtgggccggtagagggcgttggggggagcggggggtgacgcctcgcgcccccccgaggggctcagcgtctgcccagattccagacgcgcggtcagaagggcgtcgaaactgtcatactctgtgtagtcgtccggaaacatgcaggtccaaagagcggccagcgcggtgcttgggagacacatgcgcccgaggacgctcaccgccgccagcgcctgggcgggactcagctttcccagcgcggcgccgcgctcggttcccagctcggggaccgagcgccagggcgccagggggtcggtttcggacaacttgccgcggcgccagtctgccagccgcgtgccgaacatgaggccccgggtcggagggcctccggccgaaaacgctggcagcacgcggatgcgggcgtctggatgcggggtcaggcgctgcacgaatagcatggaatctgctgcgttctgaaacgcacgggggagggtgagatgcatgtactcgtgttggcggaccagatccaggcgccaaaaggtgtaaatgtgttccggggagctggccaccagcgccaccagcacgtcgttctcgttaaaggaaacgcggtgcctagtggagctctggggtccgagcggcggccccggggccgccgcgtcacccccccattccagctgggcccagcgacacccaaactcgcgcgtgagagtggtcgcgacgagggcgacgtagagctcggccgccgcatccatcgaggccccccatctcgcctggcggtggcgcacaaagcgtccgaagagctgaaagttggcggcctgggcgtcgctgagggccagctgaagccggttgatgacggtgaggacgtacatggccgtgacggtcgaggccgactccagggtgtccgtcggaagcggggggcgaatgcatgccgcctcgggacacatcagcagcgcgccgagcttgtcggtcacggccgggaagcagagcgcgtactgcagtggcgttccatccgggaccaaaaagctgggggcgaacggcctatccagcgtactggtggcctcgcgcagcaccaggggccccgggcctccgctcactcgcaggtacgcctcgccccggcggcgcagcatctgcgggtcggcctcttggccgggtggggcggacgcccgggcgcgggcgtctagggcgcgaagatccacgagcaggggcgcgggcgcggccgccgcgcccgcgcccgtctggcctgtggccttggcgtacgcgctatataagcccatgcggcgttggatgagctcccgcgcgccccggaactcctccaccgcccatggggccaggtccccggccaccgcgtccaattccgccaacaggccccccagggtgtcaaagttcatctcccaggccacccttggcaccacctcgtcccgcagccgggcgctcaggtcggcgtgttgggccacgcgccccccgagctcctccacggccccggcccgctcggcgctcttggcgcccaggacgccctggtacttggcgggaaggcgctcgtagtcccgctgggctcgcagccccgacacagtgttggtggtgtcctgcagggcgcgaagctgctcgcatgccgcgcgaaatccctcgggcgatttccaggcccccccgcgaacgcggccgaagcgaccccatacctcgtcccactccgcctcggcctcctcgaaagacctccgcagggcctcgacgcggcgacgggtgtcgaagagcgactgcaggcgcgcgccctgtcgcgtcaggaggcccgggccgtcgccgctggccgcgcttagcgggtgcgtctcaaaggtgcgctgggcatgttccaaccaggcgaccgcctgcacgtcgagctcgcgcgccttctccgtctggtccaacagaatctcgacctgatccgcgatctcctccgccgagcgcgcctggtccagcgtcttggccacggtcgccgggacggcaaccaccttcagcagggtcttcagattggccagaccctcggcctcgagctgggcccggcgctcgcgcgcggccagcacctcccgcaaccccgccgtgacccgctcggtggcttcggcgcgctgctgtttggcgcgcaccacggcgtccttggtatcggccaggtcctgtcgggtcacgaatgcgacgtagtcggcgtacgccgtgtccttcacggggctctggtccacgcgctccagcgccgccacacacgccaccagcgcgtcctcgctcgggcagggcagggtgacccctgcccggacaagctcggcggccgccgccgggtcgttgcgcaccgcggatatctcctccgcggcggcggccaggtccagcgccacgcttccgatcgcgcgccgcgcgtcggcccggagggcgtccaggcgatcgcggatatccacgtactcggcgtagcccttttgaaaaaacggcacgtactggcgcagggccggcacgccccccaagtcttccgacaggtgtaggacggcctcgtggtagtcgataaacccgtcgttcgcctgggcccgctccagcagcccccccgcgagccgcagaagccgcgccaggggctcggtgtccacccgaaacatgtcggcgtacgtgtcggccgcggccccgaaggccgcgctccagtcgatgcggtgaatggctgcgagcggggggagcatggggtggcgctggttctcgggggtgtatgggttaaacgcaagggccgtctccagggcaagggtcaccgccttggcgttggttcccagcgcctgctcggcccgctttcggaagtcccgggggttgtagccgtgcgtgcccgccagcgcctgcaggcgacggagctcgaccacgtcaaactcggcaccgctttccacgcggtccagcacggcctccacgtcggcggcccagcgctcgtggctactgcgggcgcgctgggccgccatcttctctctgaggtcggcggtggcggcctcaagttcgtcggcgcggcgtcgcgtggcgccgatgacctttcccagctcctgcagggcgcgcccgctgggggagtggtccccggccgtcccttcggcgtgcaacaggcccccgaacctgccctcgtggcccgcgaggctttcccgcgcgccggtggtcgcgcgcgtcgcggcctggatcagggaggcatgctctccctccggttggttggcggcccggcgcacctggacgacaaggtcggcggcagccgaccctaaggtcgtgagctgggcgatggccccccgcgcgtccagggccaaccgagtcgccttgacgtatcccgcggcgctgtcggccatggccgctaggaaggccaggggggaggccgggtcgctggcggccgcgcccagggccgtcactgcgtcgaccaggacgcggtgcgcccgcacggccgcatccaccgtcgacgcggggtctgccgtcgcgacggcggcgctgccggcgttgatggcgttcgagacggcgtgggctatgatcggggcgtgatcggcgaagaactgcaagagaaacggagtctcgggggcgttggcgaacaggttcttcagcaccaccacgaagctgggatgcaagccggacagagccgtcgccgtgtccggagtcgggtgctccagggcatctcggtactgccccagcagcccccacatgtccgcccgcagcgccgccgtaacctccgggggcgccccccgaacggcctcggggaggtccgaccagcccgccggcagggaggcccgcagggtcgtcaggacggccggacaggcctttagccccacaaagtcagggaggggccgcaggaccccctggagtttgtgcaagaacttctcccgggcgtcgcgggccaccttcgcccgctcccgcgctccctcgagcattgcctccagggagcgcgcgcgctcccgcaaacgggcacgcgcatcgggggcgagctctgccgtcagcttggcggcatccatggcccgcgcctgccgcagcgcttcctcggccatgcgcgtggcctctggcgacagcccgccgtcgtcggggtagggcgacgcgccgggcgcaggaacaaaggccgcgtcgctgtccagctgctggcccagggccgcatctagggcgtcgaagcgccgcagctcggccagacccgagctgcggcgcgcctgctggtcgttaatgtcgcggatgctgcgcgccagctcgtccagcggcttgcgttctatcagcccttggttggcggcgtccgtcaggacggagagccaggccgccaggtcctcgggggcgtccagcgtctggccccgctgtatcagatcccgcaacaggatggccgtggggctggtcgcgatcgggggcggggcgggaatggcggcgctctgcgcgatgtcccgcgtgtgctggtcgaagacaggcagggactctagcagctggaccacgggcacgacggcggccgaagccacgtgaaaccggcggtcgttgttgtcgctggcctgcagagccttggcgctgtatacggccccccggtaaaagtactccttaaccgcgccctcgatcgcccgacgggcctgggtccgcacctcctccagccgaacctgaacggcctcggggcccagggggggtgggcgcggagccccctgcggggccgccccggccggggcgggcattacgccgaggggcccggcgtgctgtgagaccgcgtcgaccccgcgagcgagggcgtcgagggcctcgcgcatctggcgatcctccgcctccaccctaatctcttcgccacgggcaaatttggccagagcctggactctatacagaagcggttctgggtgcgtcggggtggcgggggcaaaaagggtgtccgggtgggcctgcgagcgctccagaagccactcgccgaggcgtgtatacagattggccggcggggccgcgcgaagctgcagctccaggtccgcgagttccccgtaaaaggcgtccgtctcccgaatgacatccctagccacaaggatcagcttcgccagcgccaggcgaccgatcagagagttttcgtccagcacgtgctggacgaggggcagatgggcggccacgtcggccaggctcaggcgcgtggaggccagaaagtcccccacggccgttttccggggcagcatgctcagggtaaactccagcagggcggcggccgggccggccaccccggcctgggtgtgcgtccgggccccgttctcgatgagaaaggcgaggacgcgttcaaagaaaaaaataacacagagctccagcagccccggagaagccggatacggcgaccgtaaggcgctgatggtgagccgcgaacacgcggcgacctcgcgggccagggcggcggagcacgcggtgaacttaaccgccgtggcggccacgtttgggtgggcctcgaacagctgggcaaggtctgcgcccgggggctcgggtgagcggcgagtcttcagcgcctcgagggcctgcgaggacgccggaaccgtgggcccgtcgtcctcgcccgcctcggcgaccggcggcccggccgggtcggggggtgccgaggcgaggacaggctccggaacggaggcggggaccgcggccccgacgggggttttgcctttgggggtggatttcttcttggttttggcagggggggccgagcgtttcgttttctcccccgaagtcaggtcttcgacgctggaaggcggagtccaggtgggtcggcggcgcttgggaaggccggccgagtagcgtgcccggtgccgaccaaccgggacgacgcccatctccaggacccgcatgtcgtcgtcatcttcttcggccgcctctgcggcggggggcttgggggcggagggaggcggtggtgggatcgcggagggtgggtcggcggaggggggatccgtgggtggggtacccttcagggccaccgcccatacatcgtcgggcgcccgattcgggcgcttggcctctggttttgccgacggaccggccgtcccccgggatgtctcggaggccctgtcgtcgcgacgggcccgggtcggtggcggcgactgggcggctgtgggcgggtggggccccgtgccccctaccccctcccgggggcccacgccgacgcagggctcccccaggcccgcgatctcgccccgcagggggtgcgtgatggccacgcgccgttcgctgaacgcttcgtcctgcaggtaagtctcgctggccccgtaaagatgcagagccgcggccgtcaagtccgcaggagccgcgggttccgggcccgacggcacgaaaaacaccatggctcccgcccaccgtacgtccgggcgatcgcgggtgtaatacgtcaggtatggatacatgtcccccgcccgcactttggcgatgaacgcgggggtgccctccggaaggccgtgcgggtcaaaaaggtatgcggtgtcgccgtccctgaacagccccatccctagggggccaatggttaggagcgtgtacgacagggggcgcagggcccacgggccggcgaagaacgtgtgtgcggggcattgtgtctccagcaggcccgccgcgggctccccgaagaagcccacctcgccgtatacgcgcgagaagacacagcgcagtccgccgcgcgcccctgggtactcgaggaagttggggagctcgacgatcgaacacatgcgcggcggcccagggcccgcggtcgcgcgcgtccactcgcccccctcgaccaaacaaccctcgatggcctccgcggacagaacgtcgcgagggcccacatcaaatatgaggctgagaaaggacagcgacgagcgcatgcacgataccgacccccccggctccaggtcgggcgcgaactggttccgagcaccggtgaccacgatgtcgcgatcccccccgcgttccatcgtggagtgcggtggggtgcccgcgatcatatgtgccctactggccagagacccggcctgtttatggaccggacccccggggttagtgttgtttccgccacccatgcccccgtaccatggccccggttcccctgattaggctacgagtcgcggtgatcgcttcccaaaaaccgagctgcgtttgtctgtcttgatctttcccccccccgcccgcccgcccgcccgcacaccataacaccgagaacaacacacgggggtgggcgtaacataataaagctttattggtaactagttaacggcaagtccgtgggtggcgcgacggtgtcctccgggctcatctcgtcgtcctcgacgggggtgttggaatgaggcgccccctcgcggtccgcctggcgtgggccgtgcccataggcctccggcttctgtgcgtccatgggcataggcgcggggagactgtttccggcgtcgcggacctccaggtccctgggagactccggtccggctaacggacgaaacgcggaagcgcgaaacacgccgtcggtgacccgcaggagctcgttcatcagtaaccaatccatactcagcgtaacggccagcccctggcgagacagatccacggagtccggaaccgcggtcgtctggcccagggggccgaggctgtagtccccccaggcccctaggtcgcgacggctcgtaagcacgacgcggtcggccgcggggctttgcgggggggcgtcctcgggcgcatgcgccattacctctcggatggccgcggcgcgctggtcggccgagctgaccaagggcgccacgaccacggcgcgctccgtctgcaggcccttccacgtgtcgtggagttcctggacaaactcggccacgggctcgggtcccgcggccgcgcgcgcggcttgatagcaggccgagagacgccgccagcgcgctagaaactgacccatgaagcaaaacccggggacctggtctcccgacagcagcttcgacgcccgggcgtgaatgccggacacgacggacagaaacccgtgaatttcgcgccggaccacggccagcacgttgtcctcgtgcgacacctgggccgccagctcgtcgcacacccccaggtgcgccgtggtttcggtgatgacggaacgcaggctcgcgagggacgcgaccagcgcgcgcttggcgtcgtgatacatgctgcagtactgactcaccgcgtcccccatggcctcggggggccagggccccaggcggtcgggcgtgtccccgaccaccgcatacaggcggcgcccgtcgctctcgaaccgacactcgaaaaaggcggagagcgtgcgcatgtgcagccgcagcagcacgatggcgtcctccagttggcgaatcagggggtctgcgcgctcggcgaggtcctgcagcaccccccgggcggccagggcgtacatgctaatcaacaggaggctggtgcccacctcggggggcggggggggctgcagctggaccaggggccgcagctgctcgacggcacccctggagatcacgtacagctcccggagcagctgctctatgttgtcggccatctgcatagtggggccgaggccgccccgggcggccggttcgaggagggtaatcagcgcgcccagtttggtgcgatggccctcgaccgtggggagatagcccagcccaaagtcccgggcccaggccaacacacgcagggcgaactcgaccgggcgtggaaggtaggccgcgctacacgtggccctcaacgcgtccccgaccaccagggccagaacgtaggggacgaagcccgggtcggcgaggacgttggggtgaatgccctcgagggcggggaagcggatctgggtcgccgcggccaggtggacagagggggcgtggctgggctgcccgacggggagaagcgcggacagcggcgtggccggggtggtgggggtgatgtcccagtgggtctgaccatacacgtcgatccagatgagcgccgtctcgcggagaaggctgggttgaccggaactaaagcggcgctcggccgtctcaaactcccccacgagcgcccgccgcaggctcgccagatgttccgtcggcacggccggacccatgatacgcgccagcgtctggctcagaacgccccccgacaggccgaccgcctcgcagagccgcccgtgcgtgtgctcgctggcgccctggacccgcctgaaagtttttacgtagttggcatagtacccgtattcccgcgccagaccaaacacgttcgaccccgcgagggcaatgcacccaaagagctgctggacttcgccgagtccgtggccggcgggcgtccgcgcggggacgcccgccgccagaaacccctccagggccgaaaggtagtgcgtgcagtgcgagggcgtgaacccagcgtcgatcagggtgttgatcaccacggagggcgaattggtattctggatcaacgtccacgtctgctgcagcagagccagcagccgctgctgggcgccggcggagggctgctccccgagctgcagcaggctggagacggcaggctggaagactgccagtgccgacgaactcaggaacggcacgtcgggatcaaacacggccacgtccgtccgcacgcgcgccattagcgtccccgggggcgcacaggccgagcgcgggctgacgcggctgagggccgtcgacacgcgcacctcctcgcggctgcgaaccatcttgttggcctccagtggcggaatcattatggccgggtcgatctcccgcacggtgtgctgaaactgcgccaacaggggcggcgggaccacagccccccgctcgggggtcgtcaggtactcgtccaccagggccaacgtaaagagggcccgtgtgaggggagtgagggtcgcgtcgtctatgcgctggaggtgcgccgagaacagcgtcacccgattactcaccagggccaagaaccggaggccctcttgcacgaacggggcggggaagagcaggctgtacgccggggtggtaaggttcgcgctgggctgccccaacgggaccggcgccatcttgagcgacgtctccccaagggcctcgatggaggtccgcgggctcatggccaagcagctcttggtgacggtttgccagcggtctatccactccacggcgcactggcggacgcggaccggccccagggccgccgcggtgcgcaggccggcggaatccagcgcatgggacgtgtcggagccggtgaccgcgaggatggtgtccttgatgacctccatctcccggaaggcctggtcgggggcctcggggagagccaccaccaagcggtgtacgagcaacccggggaggttctcggccaagagcgccgtctccggaagcccgtgggcccggtggagcgcgcacaggtgttccagcagcggccgccagcatgcccgcgcgtctgccggggcgatggccgttcccgacaacagaaacgccgccatggcggcgcgcagcttggccgtggccagaaacgccgggtcgtccgccccgtttgccgtctcggccgtgggggttggcggttggcgaaggccggctaggctcgccaataggcgctgcataggtccgtccgagggcggaccggcgggtgaggtcgtgacgacgggggcctcggacgggagaccgcggtctgccatgacgcccggctcgcgtgggtgggggacagcgtagaccaacgacgagaccgggcgggaatgactgtcgtgcgctgtagggagcggcgaattatcgatcccctgcggccctccaggaaccccgcaggcgttgcgagtaccccgcgtcttcgcggggtgttatacggccacttaagtcccggcatcccgttcgcggacccaggcccgggggattgtccggatgtgcgggcagcccggacggcgtgggttgcggactttctgcggggcggcccaaatggccctttaaacgtgtgtatacggacgcgccgggccagtcggccaacacaacccaccggaggcggtagccgcgtttggctgtggggtgggtggttccgccttgcgtgagtgtcctttcgacccccccctcccccgggtcttgctaggtcgcgatctgtggtcgcaatgaagaccaatccgctacccgcaaccccttccgtgtggggcgggagtaccgtggaactcccccccaccacacgcgataccgcggggcagggcctgcttcggtgcgtcctgcgccccccgatctctcgccgcgacggcccagtgctccccagggggtcgggaccccggagggcggccagcacgctgtggttgcttggcctggacggcacagacgcgccccctggggcgctgacccccaacgacgataccgaacaggccctggacaagatcctgcggggcaccatgcgcgggggggcggccctgatcggctccccgcgccatcatctaacccgccaagtgatcctgacggatctgtgccaacccaacgcggatcgtgccgggacgctgcttctggcgctgcggcaccccgccgacctgcctcacctggcccaccagcgcgccccgccaggccggcagaccgagcggctgggcgaggcctggggccagctgatggaggcgaccgccctggggtcggggcgagccgagagcgggtgcacgcgcgcgggcctcgtgtcgtttaacttcctggtggcggcgtgtgccgcctcgtacgacgcgcgcgacgccgccgatgcggtacgggcccacgtcacggccaactaccgcgggacgcgggtgggggcgcgcctggatcgtttttccgagtgtctgcgcgccatggttcacacgcacgtcttcccccacgaggtcatgcggtttttcggggggctggtgtcgtgggtcacccaggacgagctagcgagcgtcaccgccgtgtgcgccgggccccaggaggcggcgcacaccggccacccgggccggccccgctcggccgtgatcctcccggcgtgtgcgttcgtggacctggacgccgagctggggctggggggcccgggcgcggcgtttctgtacctggtattcacttaccgccagcgccgggaccaggagctgtgttgtgtgtacgtgatcaagagccagctccccccgcgcgggttggagccggccctggagcggctgtttgggcgcctccggatcaccaacacgattcacggcaccgaggacatgacgcccccggccccaaaccgaaaccccgacttccccctcgcgggcctggccgccaatccccaaaccccgcgttgctcggctggccaggtcacgaacccccagttcgccgacaggctgtaccgctggcagccggaccttcgggggcgccccaccgcacgcacctgtacgtacgccgcctttgcagagctcggcatgatgcccgaggatagtccccgctgcctgcaccgcaccgagcgctttggggcggtcagcgtccccgttgttattctggaaggcgtggtgtggcgccccggcgagtggcgggcatgcgcgtgagcgtagcaaacgccccgcccacacaacgctccgcccccaaccccttccccgctgtcactcgtggttcgttgacccggacgtccgccaaataaagccactgaaacccgaaacgcgagtgttgtaacgtcctttgggcgggaggaagccacaaaatgcaaatgggatacatggaaggaacacacccccgtgactcaggacatcggcgtgtccttttgggtttcactgaaactggcccgcgccccacccctgcgcgatgtggataaaaagccagcgcgggtggtttagggtaccacaggtgggtgctttggaaacttgtcggtcgccgtgctcctgtgagcttgcgtccctccccggtttcctttgcgctcccgccttccggacctgctctcgcctatcttctttggctgtcggtgcgattcgtcaggcagcggccttgtcgaatctcgaccccaccactcgccggacccgccgacgtcccctctggagcccgccgaaacccgccgcgtctgttgaaatggccagccgcccagccgcatcctctcccgtcgaagcgcgggccccggttgggggacaggaggccggcggccccagcgcagccacccagggggaggccgccggggcccctctcgcccacggccaccacgtgtactgccagcgagtcaatggcgtgatggtgctttccgacaagacgcccgggtccgcgtcctaccgcatcagcgatagcaactttgtccaatgtggttccaactgcaccatgattatcgacggagacgtggtgcgcgggcgcccccaggacccgggggccgcggcatcccccgctcccttcgttgcggtgacaaacatcggagccggcagcgacggcgggaccgccgtcgttgcattcgggggaaccccacgtcgctcggcggggacgtctaccggtacccagacggccgacgtcccagccgaggcccttgggggcccccctcctcctccccgcttcaccctgggtggcggctgttgctcctgtcgcgacacacggcgccgctctgcggtattcgggggggagggggatcccgtcggccccgcggagttcgtctcggacgaccggtcgtccgattccgactcggatgactcggaggacaccgactcggagacgctgtcacacgcctcctcggacgtgtccggcggggccacgtacgacgacgcccttgactccgattcgtcatcggatgactccctgcagatagatggccccgtgtgtcgcccgtggagcaatgacaccgcgcccctggatgtttgccccgggacccccggcccgggcgccgacgccggtggtccctcagcggtagacccacacgcgccgacgacaggggccggcgctggtcttgcggccgatcccgccgtggcccgggacgacgcggaggggctttcggacccccggccacgtctgggaacgggcacggcctaccccgtccccctggaactcacgcccgagaacgcggaggccgtggcgcgctttctgggagatgccgtgaaccgcgaacccgcgctcatgctggagtacttttgccggtgcgcccgcgaggaaaccaagcgtgtcccccccaggacattctgcagcccccctcgcctcacggaggacgactttgggcttctcaactacgcgctcgtggagatgcagcgcctgtgtctggacgttcctccggtcccgccgaacgcatacatgccctattatctcagggagtatgtgacgcggctggtcaacgggttcaagccgctggtgagccggtccgctcgcctttaccgcatcctgggggttctggtgcacctgcggatccggacccgggaggcctcctttgaggagtggctgcgatccaaggaagtggccctggactttggcctgacggaaaggcttcgcgagcacgaagcccagctggtgatcctggcccaggctctggaccattacgactgtctgatccacagcacaccgcacacgctggtcgagcgggggctgcaatcggccctgaagtatgaggagttttacctaaagcgctttggcgggcactacatggagtccgtcttccagatgtacacccgcatcgccggctttttggcctgccgggccacgcgcggcatgcgccacatcgccctggggcgagaggggtcgtggtgggaaatgttcaagttctttttccaccgcctctacgaccaccagatcgtaccgtcgacccccgccatgctgaacctggggacccgcaactactacacctccagctgctacctggtaaacccccaggccaccacaaacaaggcgaccctgcgggccatcaccagcaacgtcagtgccatcctcgcccgcaacgggggcatcgggctatgcgtgcaggcgtttaacgactccggccccgggaccgccagcgtcatgcccgccctcaaggtcctcgactcgctggtggcggcgcacaacaaagagagcgcgcgtccgaccggcgcgtgcgtgtacctggagccgtggcacaccgacgtgcgggccgtgctccggatgaagggggtcctcgccggcgaagaggcccagcgctgcgacaatatcttcagcgccctctggatgccagacctgtttttcaagcgcctgattcgccacctggacggcgagaagaacgtcacatggaccctgttcgaccgggacaccagcatgtcgctcgccgactttcacggggaggagttcgagaagctctaccagcacctcgaggtcatggggttcggcgagcagatacccatccaggagctggcctatggcattgtgcgcagtgcggccacgaccgggagccccttcgtcatgttcaaagacgcggtgaaccgccactacatctacgacacccagggggcggccatcgccggctccaacctctgcaccgagatcgtccatccggcctccaagcgatccagtggggtctgcaatctgggaagcgtgaatctggcccgatgcgtctccaggcagacgtttgactttgggcggctccgcgacgccgtgcaggcgtgcgtgctgatggtgaacatcatgatcgacagcacgctacaacccacgccccagtgcacccgcggcaacgacaacctgcggtccatgggaatcggcatgcagggcctgcacacggcctgcctgaagctggggctggatctggagtctgccgaatttcaggacctgaacaaacacatcgccgaggtgatgctgctgtcggcgatgaagaccagcaacgcgctgtgcgttcgcggggcccgtcccttcaaccactttaagcgcagcatgtatcgcgccggccgctttcactgggagcgctttccggacgcccggccgcggtacgagggcgagtgggagatgctacgccagagcatgatgaaacacggcctgcgcaacagccagtttgtcgcgctgatgcccaccgccgcctcggcgcagatctcggacgtcagcgagggctttgcccccctgttcaccaacctgtttagcaaggtgacccgggacggcgagacgctgcgccccaacacgctcctgctaaaggaactggaacgcacgtttagcgggaagcgcctcctggaggtgatggacagtctcgacgccaagcagtggtccgtggcgcaggcgctcccgtgcctggagcccacccaccccctccggcgattcaagaccgcgtttgactacgaccagaagttgctgatcgacctgtgtgcggaccgcgccccctacgtcgaccatagccaatccatgaccctgtatgtcacggagaaggcggacgggaccctcccagcctccaccctggtccgccttctggtccacgcatataagcgcggactaaaaacagggatgtactactgcaaggttcgcaaggcgaccaacagcggggtctttggcggcgacgacaacattgtctgcacgagctgcgcgctgtgaccgacaaaccccctccgcgccaggcccgccgccactgtcgtcgccgtcccacgcgctcccccgctgccatggattccgcggccccagccctctcccccgctctgacggcccatacgggccagagcgcgccggcggacctggcgatccagattccaaagtgccccgaccccgagaggtacttctacacctcccagtgtcccgacattaaccacctgcgctccctcagcatccttaaccgctggctggaaaccgagcttgttttcgtgggggacgaggaggacgtctccaagctttccgagggcgagctcagcttttaccgcttcctcttcgctttcctgtcggccgccgacgacctggttacggaaaacctgggcggcctctccggcctgtttgagcagaaggacattctccactactacgtggagcaggaatgcatcgaagtcgtacactcgcgcgtgtacaacatcatccagctggtgctttttcacaacaacgaccaggcgcgccgcgagtacgtggccggcaccatcaaccacccggccatccgcgccaaggtggactggttggaagcgcgggtgcgggaatgcgcctccgttccggaaaagttcattctcatgatcctcatcgagggcatcttttttgccgcctcgtttgccgccatcgcctaccttcgcaccaacaaccttctgcgggtcacctgccagtcaaacgacctcatcagccgggacgaggccgtgcacacgacggcctcgtgttacatctacaacaactacctcggcgggcacgccaagcccccgcccgaccgcgtgtacgggctgttccgccaggcggtcgagatcgagatcggatttatccgatcccaggcgccgacggacagccatatcctgagcccggcggcgctggcggccatcgaaaactacgtgcgattcagcgcggatcgcctgttgggccttatccacatgaagccactgttttccgccccaccccccgacgccagctttccgctgagcctcatgtccaccgacaaacacaccaattttttcgagtgtcgcagcacctcctacgccggggcggtcgtcaacgatctgtgagggtcgcggcgcgcttctacccgtgtttgcccataataaacctctgaaccaaactttgggtctcattgtgattcttgtcagggacgcgggggtgggagaggataaaaggcggcgcaaaaagcagtaaccaggtccggccagattctgagggcataggataccataattttattggtgggtcgtttgttcggggacaagcgcgctcgtctgacgtttgggctactcgtcccagaatttggccaggacgtccttgtagaacgcgggtgggggggcctgggtccgcagctgctccagaaacctgtcggcgatatcaggggccgtgatatgccgggtcacgatagatcgcgccaggttttcgtcgcggatgtcctggtagataggcaggcgtttcagaagagtccacggcccccgctccttggggccgataagcgatatgacgtacttaatgtagcggtgttccaccagctcggtgatggtcatgggatcggggagccagtccagggactctggggcgtcgtggatgacgtggcgtcgccggctggccacataactgcggtgctcttccagcagctgcgcgttcgggacctggacgagctcgggcggggtgagtatctccgaggaggacgacctggggccggggtggcccccggtaacgtcccggggatccagggggaggtcctcgtcgtcttcgtatccgccggcgatctgttgggttagaatttcggtccacgagacgcgcgtctcggtgccgccggtggccggcggcagagggggcctggtttccgtggagcgcgagctggtgtgttcccggcggatggcccgccgggtctgagagcgactcgggggggtccagtgacattcgcgcagcacatcctccacggaggcgtaggtgttattgggatggaggtcggtgtggcagcggacaaagagggccaggaactgggggtagctcatcttaaagtacttcagtatatcgcgacagttgatcgtgggaatgtagcaggcgctaatatccaacacaatatcgcagcccatcaacaggaggtcagtgtccgtggtgtacacgtacgcgaccgtgttggtgtgatagaggttggcgcaggcatcgtccgcctccagctgacccgagttaatgtaggcgtaccccagggcccggagaacgcgaatacagaacagatgcgccagacgcagggccggcttcgagggcgcggcggacggcagcgcggctccggacccggccgtcccccgggtccccgaggccagagaggtgccgcgtcggcgcatgttggaaaaggcagagctgggtctggagtcggtgatgggggaaggcggtggagaggcgtccacgtcactggcctcctcgtccgtccggcactgggccgtcgtgcgggccaggatggccttggctccaaacacaaccggctccatacaattgaccccgcgatcggtaacgaagatggggaaaagggacttttgggtaaacacctttaataagcgacagaggcagtgtagcgtaatggcctcgcggtcgtaactggggtatcggcgctgatatttgaccaccaacgtgtacatgacgttccacaggtccacggcaatgggggtgaagtacccggccggggccccaaggccccggcgcttgaccagatggtgtgtgtgggcaaacttcatcatcccgaacaaacccatgtcaggtcgattgtaactgcggatcggcctaactaaggcgtggttggtgcgacggtccgggacacccgagcctgtctctctgtgtatggtgacccagacaacaacaccgacacaagaggacaataatccgttaggggacgctctttataatttcgatggcccaactccacgcggattggtgcagcaccctgcatgcgccggtgcgggccaaccttccccccgctcattgcctcttccaaaagggtgtggcctaacgagctgggggcgtatttaatcaggctagcgcggcgggcctgccgtagtttctggctcggtgagcgacggtccggttgcttgggtcccctggctgccatcaaaaccccaccctcgcagcggcatacgccccctccgcgtcccgcacccgagaccccggcccggctgccctcaccaccgaagcccacctcgtcactgtggggtgttcccagcccgcgttgggatgacggattcccctggcggtgtggcccccgcctcccacgtggaggacgcgtcggacgcgtccctcgggcagccggaggagggggcgccctgccaggtggtcctgcagggcgccgagcttaatggaatcctacaggcgtttgccccgctgcgcacgagccttctggactcgcttctggttatgggagaccggggcatccttatccataacacgatctttggggagcaggtgttcctgcccctggaacactcgcaattcagtcggtatcgctggcgcggacccacggcggcgttcctgtctctcgtggaccagaagcgctccctcctgagcgtgtttcgcgccaaccagtacccggacctacgtcgggtggagttggcgatcacgggccaggccccgtttcgcacgctggttcagcgcatatggacgacgacgtccgacggcgaggccgttgagctagccagcgagacgctgatgaagcgcgaactgacgagctttgtggtgctggttccccagggaacccccgacgttcagttgcgcctgacgaggccgcagctcaccaaggtccttaacgcgaccggggccgatagtgccacgcccaccacgttcgagctcggggttaacggcaaattttccgtgttcaccacgagtacctgcgtcacatttgctgcccgcgaggagggcgtgtcgtccagcaccagcacccaggtccagatcctgtccaacgcgctcaccaaggcgggccaggcggccgccaacgccaagacggtgtacggggaaaatacccatcgtaccttctctgtggtcgtcgacgattgcagcatgcgggcggtgctccggcgactgcaggtcgccgggggcaccctcaagttcttcctcacgacccccgtccccagtctgtgcgtcaccgccaccggtcccaacgcggtatcggcggtatttctcctgaaaccccagaagatttgcctggactggctgggtcatagccaggggtctccttccgccgggagctcggcctcccgggcctctgggagcgagccaacagacagccaggactccgcgtcggacgcggtcagccacggcgatccggaagacctcgatggcgctgcccgggcgggagaggcgggggcctcgtacgcctgtccgatgccgtcgtcgaccacgcgggtcactcccacgaccaagcgggggcgctcggggggcgaggatgcgcacgcggacacggccctaaagaaacctaagacggggtcgcccaccgcacccccgcccgcagatccagtccccctggacacggaggacgactccgatgcggcggacgggacggcggcccgtcccgccgctccagacgcccgaagcggaagccgttacgcgtgttactttcgcgacctcccgaccggagaagcaagccccggcgccttctccgccttccgggggggcccccaaaccccgtctggttttggattcccctgacggggcggggccttagcggccgcccaaccctcgcaacatcccggggttaatgtaaataaacttggtattgcccaacactctcccgcgtgtcgcgtgtggttcatgtgtgtgcctggcgcccccaccctcgggttcgtgtatttcctttccctgtccttataaaagccgtatgtggggcgctgacggaaccaccccgcgtgccatcacggccaaggcgcgggatgctccgcaacgacagccaccgggccgcgtccccggaggacggccagggacgggtcgacgacggacggccacacctcgcgtgcgtgggggccctggcgcgggggttcatgcatatctggcttcaggccgccacgctgggttttgcgggatcggtcgttatgtcgcgcgggccgtacgcgaatgccgcgtctggggcgttcgccgtcgggtgcgccgtgctgggctttatgcgcgcgccccctcccctcgcgcggcccaccgcgcggatatacgcctggctcaaactggcggccggtggagcggcccttgttctgtggagtctcggggagcccggcacgcagccgggggccctggccccgggcccggccacccagtgcctggcgctgggcgccgcctatgcggcgctcctggtgctcgccgatgacgtctatccgctctttctcctcgccccggggcccctgttcgtcggcaccctggggatggtcgtcggcgggctgacgatcggaggcagcgcgcgctactggtggatcggtgggcccgccgcggccgccctggccgcggcggtgttggcgggcccgggggcgaccaccgccagggactgcttctccagggcgtgccccgaccaccgccgcgtctgcgtcatcgtcgcaggcgagtctgtttcccgccgccccccggaggacccagagcgacccggggacccagggccaccgtcccccccgacaccccaacgatcccaggggccgccggccgatgaggtcgcaccggccggggtagcgcggcccgaaaacgtctgggtgcccgtggtcacctttctgggggctggcgcgctcgccgtcaagacggtgcgagaacatgcccggggaacgccgggcccgggcctgccgctgtggccccaggtgtttctcggaggccatgtggcggtggccctgacggagctgtgtcaggcgcttgcgccctgggaccttacggacccgctgctgtttgttcacgccggactgcaggtcatcaacctcgggttggtgtttcggttttccgaggttgtcgtgtatgcggcgctagggggtgccgtgtggatttcgttggcgcaggtgctggggctccggcgtcgcctgcacaggaaggaccccggggacggggcccggttggcggcgacgcttcggggcctcttcttctccgtgtacgcgctggggtttggggtgggggcgctgctgtgccctccggggtcaacgggcgggcggtcgggcgattgatatatttttcaataaaaggcattagtcccgaagaccgccggtgtgtgatgatttcgccataacacccaaaccccggatggggcccgggtataaattccggaaggggacacgggctaccttcactaccgagggcgcttggtcgggaggccgcatcgaacgcacacccccatccggtggtccgtgtggaggtcgtttttcagtgcccggtctcgctttgccgggaacgctagccgatccctcgcgagggggaggcgtcgggcatggccccggggcgggtgggccttgccgtggtcctgtggagcctggtgtggctcggggcgggggtgtccgggggctcggaaactgcctccaccgggcccacgatcaccgcgggagcggtgacgaacgcgagcgaggcccccacatcggggtcccccgggtcagccgccagcccggaggtcacccccacatcgaccccaaaccccaacaatgtcacacaaaaccaaaccacccccaccgagccggccagccccccaacaacccccaagcccacctccacacccaaaagcccccccacgtccacccccgaccccaaacccaagaacaacaccacccccgccaagtcggaccgccccactaaaccccccgggcccgtgtggtgcgaccgccgcgatttattggcccggtacggctcgcgggtgcagatccgatgccggtttcggaattccacccgcatggagttccgcctccagatatggcgttactccatgggtccgtcccccccaatcgctccggctcccgacctagaggaggtcctgacgaacatcaccgccccacccgggggactcctggtgtacgacagcgcccccaacctaacggacccccacgtgctctgggcggagggggccggcccgggcgccgaccctccgttgtattctgtcaccgggccgctgccgacccagcggctgattatcggcgaggtgacgcccgcgacccagggaatgtattacttggcctggggccggatggacagcccgcacgagtacgggacgtgggtgcgcgtccgcatgttccgccccccgtctctgaccctccagccccacgcggtgatggagggtcagccgttcaaggcgacgtgcacggccgccgcctactacccgcgtaaccccgtggagtttgtctggttcgaggacgaccaccaggtgtttaacccgggccagatcgacacgcagacgcacgagcaccccgacgggttcaccacagtctctaccgtgacctccgaggctgtcggcggccaggtccccccgcggaccttcacctgccagatgacgtggcaccgcgactccgtgacgttctcgcgacgcaatgccaccgggctggccctggtgctgccgcggccaaccatcaccatggaatttggggtccggcatgtggtctgcacggccggctgcgtccccgagggcgtgacgtttgcctggttcctgggggacgacccctcaccggcggctaagtcggccgttacggcccaggagtcgtgcgaccgccccgggctggctacggtccggtccaccctgcccatttcgtacgactacagcgagtacatctgtcggttgaccggatatccggccgggattcccgttctagagcaccacggcagtcaccagcccccacccagggaccccaccgagcggcaggtgatcgaggcgatcgagtgggtggggattggaatcggggttctcgcggcgggggtcctggtcgtaacggcaatcgtgtacgtcgtccgcacatcacagtcgcggcagcgtcatcggcggtaacgcgagacccccccgttacctttttaatatctatatagtttggtccccctctatcccgcccaccgctgggcgctataaagccgccaccctctcttccctcaggtcatccttggtcgatcccgaacgacacacggcgtggagcaaaacgcctccccctgagccgctttcctaccagcgcaacggcatgcctctgcgggcatcggaacacgcctaccggcccctgggccccgggacaccccccatgcgggctcggctccccgccgcggcctgggttggcgtcgggaccatcatcgggggagttgtgatcattgccgcgttggtcctcgtgccctcgcgggcctcgtgggcactttccccatgcgacagcggatggcacgagttcaacctcgggtgcatatcctgggatccgacccccatggagcacgagcaggcggtcggcggctgtagcgccccggcgaccctgatcccccgcgcggctgccaaacagctggccgccgtcgcacgcgtccagtcggcaagatcctcgggctactggtgggtgagcggagacggcattcgggcctgcctgcggctcgtcgacggcgtcggcggtattgaccagttttgcgaggagcccgcccttcgcatatgctactatccccgcagtcccgggggctttgttcagtttgtaacttcgacccgcaacgcgctggggctgccgtgaggcgcgtgtactgcggtctgtctcgtctcctcttctccccttccctccccctccgcatcccaggatcacaccggccaacgagggttggggggtccggcacggacccaaaataataaacacacaatcacgtgcgataaaaagaacacgcggtcccctgtggtgtttttggttatttttattaaatctcgtcgtcaaacagggggaaaggggcgtggtctagcgacggcagcacgggtggaggcgttcaccggctccggcgtccttcgcgtttaagcttggtcaggagggcgctcagggcggcgacgttggtcgggccgtcgttggtcagggcgttggctcgatggcgggcgaggacgggcgaggggctcaacggcgggggcgggggcccggtgcggcccgggggggaaaatagggcggatcccccccagtcgtacaggggattttccgcctcaatgtacggggaggccggcgctgcattcgccgtgttcgcgcagacgttttcgtagacccgcatccatggtatttcctcgtagacacgccccccgtcctcgctcacagtctcgtatattgactcgtcgtcctcgtagggggcgtgccgttcgcgggccgaggcggcgtgggtggctttgcggcgggcgtcgtcgtcgtcgtcggccgtcagatacgtggcttccatctggtcgggttctccctccggggcgggtccccacccccgtggccgatcgaggctccccagagacgcgcgccggacgaggagggggcacgtcgccgccggcggtcgcctgtcgggtcccgcgacgttacgggccgggaggcgcgggggcacctcccccatgtgcgtgtaatacgtggccggctgtgcggccgcagcggggggctcggcgaccgggtcgtccgcatccggaagcgggggcgccgcgccgtccgcgcggcgcctccggaaccgccgggtggccgcgggggtcgagtgtaggcgaggtcgggggaggggcgggggctcgttgtcgcgccgcgcccgctgaatcttttcccgacaggtcccaccccccgcgcgatgcccccccgggccgcgggccatgtcgtccgggggaggccccgcggaccacgtcgtccggcgagacgccacgagccgcaggatggactcgtagtggagcgacggcgccccgctgcggagcagatccgcggccagggcggccccgaaccaagccttgatgctcaactccatccgggcccagctgggggcggtcatcgtggggaacaggggggcggtggtccgacagaaacgctcctggctgtccaccgcggcccgcagatactcgttgttcaggctgtcggtggcccagacgccgtacccggtgagggtcgcgttgatgatatactgggcgtggtgatggacgatcgacagaacctccaccgtggatacgacggtatccacggtcccgtacgtaccgccgctccgcttgccggtctgccacaggttggctaggcgcgtcaggtggcccaggacgtcgctgaccgccgccctgagcgccatgcactgcatggagccggtcgtgccgctgggaccccggtccagatggcgcgcgaacgtttccgcgggcgcctccgggctgccgccgagcgggaggaaccggcgattggagggactcagccggtggcatacgtgcttgtctgtcgtccacagcatccaggacgcccaccggtacagcacggagacgtaggccaggagctcgttgagccgcagtgcggtgtcggtgctggggcggcttgggtccgccgggcgcataaagaacatgtactgctgaatccgatggagggcgtcgcgcaggccggccacggtggcggcgtacttggccgccgcggccccgctcttgaacggggtgcgcgccagcagctttggcgccagggtgggccgcagcagcacgtgaaggctggggtcgcagtcgcccacggggtcctcggggacgtccaggccgctgggcaccaccgtctgcaggtacttccagtactgcgtgaggatggcgcggctcaactggccgccggtgagctccacctcgcccagcgcctgggtggcggccgaagcgtagtgccggatgtactcgtagtgcgggtcgctggcgagcccgtccacgatcaaactctcgggaaccgtgttgtgttgccgcgcggccaaccggacgctgcgatcggtgcaggtcagaaacgccggctgcgcgtcgtcggagcgctgccgcaaggcgcccacggccgcgctaaggagcccctccggggtggggagcagacacccgccgaagatgcgccgctcgggaacgcccgcgttgtcgccgcggatcaggttggcaggcgtcaggcaccgcgccagccgcagggagctcgcgccgcgcgtccggcgctgcatggtgacgcccgttcggtcgggacccgccggtcggagttatgccgcgtccagggccatcggggcgctttttatcgggaggagcttatgggcgtggcgggcctcccagcccggtcgcgcgcctccccgacacgtgcgcccgcagggcggcggccccctcgtctcccatcagcagtttcctaaactgggacatgatgtccaccacgcggacccgcgggcccaacacggacccgccgcttacgggggcgggggggaagggctccaggtccttgagaagaaaggcggggtctgccgtcccggacacgggggcccggggcgctgaggaggcggggcgcagatccacgtgctccgcggccgcgcggacgtccgcccagaacttggcgggggtggtgcgcgcgtacaggggctgggtcgctcggaggacgcacgcgtagcgcaggggggtgtacgtgcccacctcgggggccgtgaatcccccgtcaaacgcggccagtgtcacgcacgccaccacggtgtcggcaaagcccagcagccgctgcaggacgagcccggcggccagaatggcgcgcgtggccgccgcgtcgtcccggcgccggtgcgcgtccccgcacgcccgggcgtactttaaggtcacggtcgccagggccgtgtgcagcgcgtacaccgcagcgcccagcacggcgttgagcccgctgttggcgagcagccggcgcgctgcggtgtcgcccagcgcctcgtgctcggcccccacgaccgcggggcttcccaggggcagggcgcgaaacagctcctcccgcgccacgtccgcaaaggcggggtggtgcacgtgcgggtgcaggcgcgcccccacgaccaccgagagccactggaccgtctgctccgccatcaccgccagcacatccagcacgcgccccaggaaggcggcctcccgcgtcaaaacgcaccggacggcgtcgggattgaagcgggcgagcagggccccggtggccaggtacgtcatgcggccggcatagcgggcggccacgcgacagtcgcggtccagcagcgcgcgcaccccgggccagtacagcagggaccccagcgagctgcgaaacaccgcggcgtcggggccggattggggggacactaacccccccgcgctcagtaacggcacggccgcggccccgacgggacgcaacgccgtgaggctcgcgaactgccgcctcagctcggcagccctgtcgtccaggtccgacccgcgcgcctctgcgtgaaggcgcgtcccgcacacccacccgttgatggccagccgcacgacggcatccgccaaaaagctcatcgcctgggcggggctggtttttgttcgacgatccgtcaggtcaagaatcccatcgcccgtgatataccaggccaacgcctcgccctgctgcagggtttggcggaaaaacaccgcggggttgtcgggggaggcgaagtgcatgacccccacgcgcgataacccgaacgcgctatccggacacgggtaaaacccggccggatgccccagggctagggcggagcgcacggactcgtcccacacggcaacctgaggggccagtcgatccaacgggaatgccgcccggagctccgggcccggcacgcgtccctccagaacctccaccttgggcggggaacgggccccgccgccgtcctccggcccgacgtcttccgggtagtcgtcctcctcgtactgcagctcctctaggaacagcggcgacggcgccacccgcgaaccgccgacccgccccaaaatagcccgcgcgtcgacgggacccaggtatcccccctgccgggcctgcggaggaccgcggggaacctcatcatcatcgtccaggcgaccgcgcaccgactggctacgggccgcatcgggcccggggcgctgccgggacgctcggcgatgggatgtgggcggggcttccgacgcgcgccgtcgtcgggctcgcgggccttcccgtcgacggcgcacgggcggctcgtcgcccgccatctcctccagagcctctagctcgctgtcgtcatccccgcggaacaccgcacgcaggtaccccatgaaccccaccccatcgcccgctggctcgtccgccacgggcgaggcgcgggggcgggtggatgcgcgcctcctacgccccgcgggttcgcgagccgacatggtggcgatagacgcgggttatcggatgtccgctaccccccaaaaaagaaaaagaccccacagcgcggatggaggccggggtaggtgccgccggaccccctcgcgatgggaatggacgggagcgacggggccggcgcaaaaaacgcagtatctcccgcgaaggctacccgccgccccagcccccggccaaatgcggaaacggtcccgcgctctcgcctttatacgcgggccgccctgcgacacaatcacccgtccgtggtttcgaatctacacgacaggcccgcagacgcggctaacacacacgccggcaacccagaccccagtgggttggttgcgcggtcccgtctcctggctagttcttttccccaccaccaaataatcagacgacaaccgcaggtttttgtaatgtatgtgctcgtgtttattgtggatacgaaccggggacgggaggggaaaacccagacgggggatgcgggtccggtcgcgccccctacccaccgtactcgtcaattccaagggcatcggtaaacatctgctcaaactcgaagtcggccatatccagagcgccgtagggggcggagtcgtggggggtaaatcccggacccggggaatccccgtcccccaacatgtccagatcgaaatcgtctagcgcgtcggcatgcgccatcgccacgtcctcgccgtctaagtggagctcgtcccccaggctgacatcggtcgggggggccgtcgacagtctgcgcgtgtgtcccgcggggagaaaggacaggcgcggagccgccagccccgcctcttcgggggcgtcgtcgtccgggagatcgagcaggccctcgatggtagacccgtaattgtttttcgtacgcgcgcggctgtacgcgtgttcccgcatgaccgcctcggagggcgaggtcgtgaagctggaatacgagtccaacttcgcccgaatcaacaccataaagtacccagaggcgcgggcctggttgccatgcagggtgggaggggtcgtcaacggcgcccctggctcctccgtagccgcgctgcgcaccagcgggaggttaaggtgctcgcgaatgtggtttagctcccgcagccggcgggcctcgattggcactccccggacggtgagcgctccgttgacgaacatgaagggctggaacagacccgccaactgacgccagctctccaggtcgcaacagaggcagtcaaacaggtcgggccgcatcatctgctcggcgtacgcggcccataggatctcgcgggtcaaaaatagatacaaatgcaaaaacagaacacgcgccagacgagcggtctctcggtagtacctgtccgtgatcgtggcgcgcagcatttctcccaggtcgcgatcgcgtccgcgcatgtgcgcctggcggtgcagctgccggacgctggcgcgcaggtaccggtacagggccgagcagaagttggccaacacggttcgatagctctcctcccgcgcccgtagctcggcgtggaagaaacgagagagcgcttcgtagtagagcccgaggccgtcgcgggtggccggaagcgtcgggaaggccacgtcgccgtgggcgcgaatgtcgatttgggcgcgttcggggacgtacgcgtccccccattccaccacatcgctgggcagcgttgataggaatttacactcccggtacaggtcggcgttggtcggtaacgccgaaaacaaatcctcgttccaggtatcgagcatggtacatagcgcggggcccgcgctaaagcccaagtcgtcgaggagacggttaaagagggcggcgggggggacgggcatgggcggggagggcatgagctgggcctggctcaggcgccccgttgcgtacagcggaggggccgccggggtgtttttgggacccccggccgggcgggggggtggtggcgaagcgccgtccgcgtccatgtcggcaaacagctcgtcgaccaagaggtccattgggtggggttgatacgggaaagacgatatcgggcttttgatgcgatcgtccccgcccgcccagagagtgtgggacgcccgacggcgcgggaagagaaaaacccccaaacgcgttagaggaccggacggaccttatggggggaagtgggcagcgggaaccccgtccgttcccgaggaatgacagcccgtggtcgccaccccgcatttaagcaacccgcacgggccgccccgtacctcgtgacttccccccacattggctcctgtcacgtgaaggcgaaccgagggcggctgtccaacccaccccccgccacccagtcacggtccccgtcggattgggaaacaaaggcacgcaacgccaacaccgaatgaacccctgttggtgctttattgtctgggtacggaagtttttcactcgacgggccgtctggggcgagaagcggagcgggctggggctcgaggtcgctcggtggggcgcgacgccgcagaacgccctcgagtcgccgtggccgcgtcgacgtcctgcaccacgtctggattcaccaactcgttggcgcgctgaagcaggtttttgccctcgcagaccgtcacgcggatggtggtgatgccaaggagttcgttgaggtcttcgtctgtgcgcggacgcgacatgtcccagagctggaccgccgccatccgggcatgcatggccgccaggcgcccgaccgcggcgcagaagacgcgcttgttaaagccggccacccggggggtccatggcgcgtcggggtttgggggggcggtgctaaagtgcagctttctggccagcccctgcgcgggtgtcttggatcgggttggcgccgtcgacgcgggggcgtctgggagtgcggcggattctggctgggccgatttcctgccgcgggtggtctccgccgccggggccgcgggggccttagtcgccacccgctgggttcggggggcccggggggcggtggtgggtgtgcgtccggcccctccggacccagcgggcggcggaggcgcccgcgcaggccccgggccggacaaaaccgccccggaaacgggacgccgcgtccgggggacctccgggtgttcgtcgtcttcggatgacgagcccccgtagagggcataatccgactcgtcgtactggacgaaacggacctcgcccctcgggcgcgcgcgtgtctgtagggcgccacggcgggaggtggcaggcggactatcgggactcgccatacatgaagacggggtgtagtacagatcctcgtactcatcgcgcggaacctcccgcggacccgacttcacggagcggcgagaggtcatggttccacgaacacgctagggtcggatgcgcggacaattaggcctgggttcggacggcggggggtggtgcaggtgtggagaggtcgagcgataggggcggcccgggagagaagagagggtccgcaaaacccactggggatgcgtgagtggccctctgtgggcggtgggggagagtcttataggaagtgcatataaccacaacccatgggtctaaccaatccccaggggccaagaaacagacacgccccaaacggtctcggtttccgcgaagaaggggaagtcctgggacaccctccacccccacccctcaccccacacagggcgggttcaggcgtgcccggcagccagtagcctctggcagatctgacagacgtgtgcgataatacacacgcccatcgaggccatgcctacataaaagggcaccagggcccccggggcagacatttggccagcgttttgggtctcgcaccgcgcgcccccgatcccatcgcgcccgccctcctcgccgggcggctccccgtgcgggcccgcgtctcccgccgctaaggcgacgagcaagacaaacaacaggcccgcccgacagacccttctgggggggcccatcgtccctaacaggaagatgagtcagtggggatccggggcgatccttgtccagccggacagcttgggtcgggggtacgatggcgactggcacacggccgtcgctactcgcgggggcggagtcgtgcaactgaacctggtcaacaggcgcgcggtggcttttatgccgaaggtcagcggggactccggatgggccgtcgggcgcgtctctctggacctgcgaatggctatgccggctgacttttgtgcgattattcacgcccccgcgctatccagcccagggcaccacgtaatactgggtcttatcgactcggggtaccgcggaaccgttatggccgtggtcgtagcgcctaaaaggacgcgggaatttgcccccgggaccctgcgggtcgacgtgacgttcctggacatcctggcgccccccccggccctcaccaagccgatttccctgcggcagttcccgcaactggcgcccccccctccaaccggggccgggatacgcgcagatccttggttggagggggcgctcggggacccaagcgtgactccggccctaccggcgcgacgccgagggcggtccctcgtctatgccggcgagctgacgccggttcagacggaacacggggacggcgtacgagaagccatcgccttccttccaaaacgcgaggaggatgccggtttcgacattgtcgtccgtcgcccggtcaccgtcccggcaaacggcaccacggtcgtgcagccatccctccgcatgctccacgcggacgccgggcccgcggcctgttatgtgttggggcggtcgtcgctcaacgcccgcggcctcctggtcgttcctacgcgctggctccccgggcacgtatgtgcgtttgttgtttacaaccttacgggggttcctgtgaccctcgaggccggcgccaaggtcgcccagctcctggttgcgggggcggacgctcttccttggatccccccggacaactttcacgggaccaaagcgcttcgaaactaccccaggggtgttccggactcaaccgccgaacccaggaacccgccgctcttggtgtttacgaacgagtttgacgcggaggcccccccgagcgagcgcgggaccgggggttttggctctaccggtatttagcccatagcttggggttcgttccgggcaataaaaaacgtttgtatctcatctttcctgtgtgtagttgtttctgttggaggcctgtgggtctatcacacccgcccctccatcccacaaacacagaacacacgggttggatgaaaacacgcatttattgacccaaaacacacggagctgctcgagatgggccagggcgaggtgcggttggggaggctgtaggtctgggaacggacacgcggggacacgattccggtttggggtccgggagggcgtcgccgtttcgggcggcaggcgccagcgtaacctccgggggcggcgtgtgggggtgccccaaggagggcgcctcggtcaccccaagcccccccaagcgggttcccccggcaaccccgaaggcggagaggccaagggcccgttcggcgatggccacatcctccatgaccacgtcgctctcggccatgctccgaatagcctgggagacgagcacatccgcggacttgtcagccgcccccacggacatgtacatctgcaggatggtggccatacacgtgtccgccaggcgccgcatcttgtcctgatgggccgccacggccccgtcgatcgtgggggcctcgagcccggggtggtggcgcgccagtcgttctaggttcaccatgcaggcgtggtacgtgcgggccaaggcgcgggccttcacgaggcgtcgggtgtcgtccagggaccccagggcgtcatcgagcgtgatgggggcgggaagtagcgcgttaacgaccaccagggcctcctgcagccgcggctccgcctccgagggcggaacggccgcgcggatcatctcatattgttcctcggggcgcgctccccagccacatatagccccgagaagagaagccatcgcgggcgggtactggcccttgggcgcgcggacgcaatggggcaggaagacgggaaccgcggggagaggcgggcggccgggactcccgtggaggtgaccgcgctttatgctaccgacgggtgcgttattacctcttcgatcgccctcctcacaaactctctactgggggccgagccggtttatatattcagctacgacgcatacacgcacgatggccgtgccgacgggcccacggagcaagacaggttcgaagagagtcgggcgctctaccaagcgtcgggcgggctaaatggcgactccttccgagtaaccttttgtttattggggacggaagtgggtgggacccaccaggcccgcgggcgaacccgacccatgttcgtctgtcgcttcgagcgagcggacgacgtcgccgcgctacaggacgccctggcgcacgggaccccgctacaaccggaccacatcgccgccaccctggacgcggaggccacgttcgcgctgcatgcgaacatgatcctggctctcaccgtggccatcaacaacgccagcccccgcaccggacgcgacgccgccgcggcgcagtatgatcagggcgcgtccctacgctcgctcgtggggcgcacgtccctgggacaacgcggccttaccacgctatacgtccaccacgaggcgcgcgtgctggccgcgtaccgcagggcgtattatggaagcgcgcagagtcccttctggtttcttagcaaattcgggccggacgaaaaaagcctggtgctcaccactcggtactacctgcttcaggcccagcgtctggggggcgcgggggccacgtacgacctgcaggccatcaaggacatctgcgccacctacgcgattccccacgccccccgccccgacaccgtcagcgccgcgtccctgacctcgtttgccgccatcacgcggttctgttgcacgagccagtacgcccgcggggccgcggcggccgggtttccgctttacgtggagcgccgtattgcggccgacgtccgcgagaccagtgcgctggagaagttcataacccacgatcgcagttgcctgcgcgtgtccgaccgtgaattcattacgtacatttacctggcccattttgagtgtttcagccccccgcgcctagccacgcatcttcgggccgtgacgacccacgaccccaaccccgcggccaacacggagcagccctcgcccctgggcagggaggccgtggaacaatttttttgccacgtgcgcgcccaactgaatatcggggagtacgtcaaacacaacgtgaccccccgggagaccgtcctggatggcgatacggccaaggcctacctgcgcgctcgcacgtacgcgcccggggccctgacgcccgcccccgcgtattgcggggccgtggactccgccaccaaaatgatggggcgtttggcggacgccgaaaagctcctggtcccccgcgggtggcccgcgtttgcgcccgccagtcccggggaggatacggcgggcggcacgccgcccccacagacctgcggaatcgtcaagcgcctcctgagactggccgccacggaacaacaggacaccacgcccccggcgatcgcggcgcttatccgtaatgcggcggtgcagactcccctgcccgtctaccggatatccatggtccccacgggacaggcatttgccgcgctggcctgggacgactgggcccgcataacgcgggacgctcgcctggccgaagcggtcgtgtccgccgaagcggcggcgcaccccgaccacggcgcgctgggcaggcggctcacggatcgcatccgcgcccagggccccgtgatgccccctggcggcctggatgccggggggcagatgtacgtgaatcgcaacgagatattcaacggcgcgctggcaatcacaaacatcatcctggatctcgacatcgccctgaaggagcccgtcccctttcgccggctccacgaggccctgggccactttaggcgcggggctctggctgcggttcagctcctgtttcccgcggcccgcgtggaccccgacgcatatccctgttattttttcaaaagcgcatgtcggcccggcccggcgtccgtgggttccggcagcggactcggcgacgacggggactggtttccctgctacgacgacgccggtgatgaggagtgggcggaggacccgggcgccatggacacatcccacgatcccccggacgacgaggttgcctactttgacctgtgccacgaagtcggccccacggcggaacctcgcgaaacggattcgcccgtgtgttcctgcaccgacaagatcggactgcgggtgtgcatgcccgtccccgccccgtacgtcgtccacggttctctaacgatgcggggggtggcacgggtcatccagcaggcggtgctgttggaccgagattttgtggaggccatcgggagctacgtaaaaaacttcctgttgatcgatacgggggtgtacgcccacggccacagcctgcgcttgccgtattttgccaaaatcgcccccgacgggcctgcgtgcggaaggctgctgccagtgtttgtgatcccccccgcctgcaaagacgttccggcgtttgtcgccgcgcacgccgacccgcggcgcttccattttcacgccccgcccacctatctcgcttccccccgggagatccgtgtcctgcacagcctgggtggggactatgtgagcttctttgaaaggaaggcgtcccgcaacgcgctggaacactttgggcgacgcgagaccctgacggaggtcctgggtcggtacaacgtacagccggatgcgggggggaccgtcgaggggttcgcatcggaactgctggggcggatagtcgcgtgcatcgaaacccactttcccgaacacgccggcgaatatcaggccgtatccgtccggcgggccgtcagtaaggacgactgggtcctcctacagctagtccccgttcgcggtaccctgcagcaaagcctgtcgtgtctgcgctttaagcacggccgggcgagtcgcgccacggcgcggacattcgtcgcgctgagcgtcggggccaacaaccgcctgtgcgtgtccttgtgtcagcagtgctttgccgccaaatgcgacagcaaccgcctgcacacgctgtttaccattgacgccggtacgccatgctcgccgtccgttccctgcagcacctctcaaccgtcgtcttgataacggcgtacggcctcgtgctcgtgtggtacaccgtcttcggtgccagtccgctgcaccgatgtatttacgcggtacgccccaccggcaccaacaacgacaccgccctcgtgtggatgaaaatgaaccagaccctattgtttctgggggccccgacgcacccccccaacgggggctggcgcaaccacgcccatatctgctacgccaatcttatcgcgggtagggtcgtgcccttccaggtcccacccgacgccatgaatcgtcggatcatgaacgtccacgaggcagttaactgtctggagaccctatggtacacacgggtgcgtctggtggtcgtagggtggttcctgtatctggcgttcgtcgccctccaccaacgccgatgtatgtttggtgtcgtgagtcccgcccacaagatggtggccccggccacctacctcttgaactacgcaggccgcatcgtatcgagcgtgttcctgcagtacccctacacgaaaattacccgcctgctctgcgagctgtcggtccagcggcaaaacctggttcagttgtttgagacggacccggtcaccttcttgtaccaccgccccgccatcggggtcatcgtaggctgcgagttgatgctacgctttgtggccgtgggtctcatcgtcggcaccgctttcatatcccggggggcatgtgcaatcacataccccctgtttctgaccatcaccacctggtgttttgtctccaccatcggcctgacagagctgtattgtattctgcggcggggcccggcccccaagaacgcagacaaggccgccgccccggggcgatccaaggggctgtcgggcgtctgcgggcgctgctgttccatcatcctctcgggcatcgcagtgcgattgtgttatatcgccgtggtggccggggtggtgctcgtggcgcttcactacgagcaggagatccagaggcgcctgtttgatgtatgacgtcacatccaggccggcggaaaccggaacggcatatgcaaattggaaactgtcctgtcttggggcccacccacccgacgcgtcatatgcaaatgaaaatcggtcccccgaggccacgtgtagcctggatcccaacgaccccgcccatgggtcccaattggccgtcccgttaccaagaccaacccagccagcatatccacccccgcccgggtccccgcggaagcggaacggtgtatgtgatatgctaattaaatacatgccacgtacttatggtgtctgattggtccttgtctgtgccggaggtggggcgggggccccgcccggggggcggaacgaggaggggtttgggagagccggccccggcaccacgggtataaggacatccaccacccggccggtggtggtgtgcagccgtgttccaaccacggtcacgcttcggtgcctctccccgattcgggcccggtcgctcgctaccggtgcgccaccaccagaggccatatccgacaccccagccccgacggcagccgacagcccggtcatggcgactgacattgatatgctaattgacctcggcctggacctctccgacagcgatctggacgaggacccacccgagccggcggagagccgccgcgacgacctggaatcggacagcagcggggagtgttcctcgtcggacgaggacatggaagacccccacggagaggacggaccggagccgatactcgacgccgctcgcccggcggtccgcccgtctcgtccagaagaccccggcgtacccagcacccagacgcctcgtccgacggagcggcagggccccaacgatcctcaaccagcgccccacagtgtgtggtcgcgcctcggggcccggcgaccgtcttgctcccccgagcagcacgggggcaaggtggcccgcctccaacccccaccgaccaaagcccagcctgcccgcggcggacgccgcgggcgtcgcaggggtcggggtcgcggtggtcccggggccgccgatggtttgtcggacccccgccggcgtgcccccagaaccaatcgcaacccggggggaccccgccccggggcggggtggacggacggccccggcgccccccatggcgaggcgtggcgcggaagtgagcagcccgacccacccggaggcccgcggacacggggcgtgcgccaagcaccccccccgctaatgacgctggcgattgcccccccgcccgcggacccccgcgccccggccccggagcgaaaggcgcccgccgccgacaccatcgacgccaccacgcggttggtcctgcgctccatctccgagcgcgcggcggtcgaccgcatcagcgagagctttggccgcagcgcacaggtcatgcacgacccctttggggggcagccgtttcccgccgcgaatagcccctgggccccggtgttggcgggccaaggagggccctttgacgccgagaccagacgggtctcctgggaaaccttggtcgcccacggcccgagcctctatcgcacttttgccggcaatcctcgggccgcatcgaccgccaaggccatgcgcgactgcgtgctgcgccaagaaaatttcatcgaggcgctggcctccgccgacgagacgctggcgtggtgcaagatgtgcatccaccacaacctgccgctgcgcccccaggaccccattatcgggacggccgcggctgtgctggataacctcgccacgcgcctgcggccctttctccagtgctacctgaaggcgcgaggcctgtgcggcctggacgaactgtgttcgcggcggcgtctggcggacattaaggacattgcatccttcgtgtttgtcattctggccaggctcgccaaccgcgtcgagcgtggcgtcgcggagatcgactacgcgacccttggtgtcggggtcggagagaagatgcatttctacctccccggggcctgcatggcgggcctgatcgaaatcctagacacacaccgccaggagtgttcgagtcgtgtctgcgagttgacggccagtcacatcgtcgcccccccgtacgtgcacggcaaatatttttattgcaactccctgttttaggtacaataaaaacaaaacatttcaaacaaatcgccccacgtgttgtccttctttgctcatggccggcggggcgtgggtcacggcagatggcgggggtgggcccggcgtacggcctgggtgggcggagggaactaacccaacgtataaatccgtccccgctccaaggccggtgtcatagtgcccttaggagcttcccgcccgggcgcatccccccttttgcactatgacagcgacccccctcaccaacctgttcttacgggccccggacataacccacgtggcccccccttactgcctcaacgccacctggcaggccgaaacggccatgcacaccagcaaaacggactccgcttgcgtggccgtgcggagttacctggtccgcgcctcctgtgagaccagcggcacaatccactgctttttctttgcggtatacaaggacacccaccacacccctccgctgattaccgagctccgcaactttgcggacctggttaaccacccgccggtcctacgcgaactggaggataagcgcggggtgcggctgcggtgtgcgcggccgtttagcgtcgggacgattaaggacgtctctgggtccggcgcgtcctcggcgggagagtacacgataaacgggatcgtgtaccactgccactgtcggtatccgttctcaaaaacatgctggatgggggcctccgcggccctacagcacctgcgctccatcagctccagcggcatggccgcccgcgcggcagagcatcgacgcgtcaagattaaaattaaggcgtgatctccaacccccccatgaatgtgtgtaaccccccaaaaaaataaacagccgtaacccaatcaaaccaggcgtggtgtgagtttgtggacccaaagccctcagagacaacgcgacaggccagtatggaccgtgatacttttatttattaactcacaggggcgcttaccgccacaggaataccagaataatgaccaccactatcgcgaccaccccaaatacagcatggcgccccaccacgccacaacagccctgtcgccggtatggggcatgatcagacgagccgcgagccgcgcgttgggccctgtacagctcgcgcgaattgaccctaggaggccgccacgcgcccgagttttgcgttcgtcgctggtcgtcgggcgccaaagccccggacggctgttcggtcgaacgaacggccacgacagtggcataggttggggggtggtccgacatagcctcggcgtacgtcgggaggcccgacaagaggtcccttgagatgtcgggtggggccacaagcctggtttccggaagaaacaggggggttgccaataacccgccagggccaaaactccggcgctgcgcacgtcgttcggcgcggcgccgggcgcgccgagcggctcgctgggcggcttggcgtgagcggccccgctccgacgcctcgccctctccggaggaggttggcggaattggcacggacgacaggggcccagcagagtacggtggaggtgggtccgtgggggtgtccagatcaataacgacaaacggcccctcgttcctaccagacaagctatcgtaggggggcgggggatcagcaaacgcgttccccgcgctccatagacccgcgtcgggttgcgccgcctccgaagccatggatgcgccccaaagccacgactcccgcgcgctaggtccttggggtaagggaaaaggccctactccccatccaagccagccaagttaacgggctacgccttcggggatgggactggcaccccggcggattttgttgggctggtacgcgttgcccaaccgagggccgcgtccacgggacgcgccttttataaccccgggggtcattcccaacgatcacatgcaatctaactggctcccctctccccccctctcccctctccccccctctcccctctccccccctctcccctctccccccctctcccctctccccccctctcccctctccccccctctcccctctccccccctctcccctctccccccctctcccctctccccccctctcccctctccccccctctcccctctccccccctgctctttccccgtgacacccgacgctggggggcgtggctgccgggaggggccgcggatgggcggggcctactcggtctcccgcccccgcccccgaaccgccccgccggccttgcccccctttgatcccctgctacccccaacccgtgctcgtggtgcgggttgggtggggggggggagtgtgggcgggggtgtgcgggaggtgtcggtggtggtggtggtggtaggaatggtggtgaggggggggggcgctggttggtcaaaaaagggagggacgggggccggcagaccgacggcgacaacgctccccggcggccgggtcgcggctcttacgagcggcccggcccgcgctcccaccccccgggccgtgtccttgctttccccccgtctccccccccctccttctcctcctcctcctcctcgtttttccaaaccccgcccacccggcccggcccggcccggccaccgccgcccacccacccacctcgggagacccagccccggtcccccgttccccgggggccgttatctccagcgccccgtccggcgcgccgccccccgccgctaaaccccatcccgcccccgggaccccacatataagcccccagccacacgcaagaacagacacgcagaacggctgtgtttatttaaataaaccgatgtcggaataaacaaacacaaacacccgcgacggggggacggagggaggggggtgacgggggacgggaacagccacaaaaaacacccacaaaaaaaaacagccacccccgacacccccccccacccccagtctcttcgccttttcccccccaccccacgcccccactgagcccggtcgatcgacgagcacccccgcccccgcccctgccccggcgacccccggcccgcacgatcccgacaacaataacaaccccaacggaaagcggcggggtgtgggggggggcgaggaacaaccgaggggaacgggggatggaaggacgggaagtggaagtcctgatacccatcctacacccccctgccttccaccctccggccccccgcgagtccacccgccggccggctaccgagaccgaacacggcggccgccgcagccgccgcagccgccgccgacaccgcagagccggcgcgcgcacacacaagcggcagaggcagaaaggcccagagtcattgtttatgtggccgcgggccagcagacggcccgcgacacccccccccccgcccgtgtgggtatccggccccccgccccgcgccggtccattaagggcgcgcgtgcccgcgagatatcaatccgttaagtgctctgcagacaggggcaccgcgcccggaaatccattaggccgcagacgaggaaaataaaattacatcacctacccacgtggtgctgtggcctgtttttgctgcgtcatctgagcctttataaaagcgggggcgcggccgtgccgatcgcgggtggtgcgaaagactttccgggcgcgtccgggtgccgcggctctccgggcccccctgcagccggggcggccaaggggcgtcggcgacatcctccccctaagcgccggccggccgctggtctgttttttgttttccccgtttcgggggtggggggggttgcggtttctgtttctttaacccgtctggggtgtttttcgttccgtcgccggaatgtttcgttcgtctgtcccctcacggggcgaaggccgcgtacggcccgggacgagggggcccccgaccgcggcggtccgggccccgtccgggcccgctcgccggcacgcgacgcgaaaaaggccccccggaggcttttccgggttcccggcccggggcctgagataaacaatcggggttaccgccaacggccggcccccgtggcggcccggcccggggccccggcggacccaaggggccccggcccggggccccacaacggcccggcgcatgcgctgtggtttttttttctcggtgttttgtcgggctccgtcgcctttcctgttctcgcttctccccccccccccttcttcacccccagtaccctcctccctcccttcctcccccgttatcccactcgtcaagggcgccccggtgtggttcaacaaagacgccgcgtttccaggtaggttagacacctgcttctccccaatagaggggggggacccaaacgacagggggcgccccagaggctaaggtcggccacgccactcgcgggtgggctcgtgttacagcacaccagcccgttcttttccccccctcccacccttagtcagactctgttacttacccgtccgaccaccaactgcccccttatctaagggccggctggaagaccgccagggggtcggccggtgtcgctgtaaccccccacgccaatgacccacgtactccaagaaggcatgtgtcccaccccgcctgtgtttttgtgcctggctctctatgcttgggtcttactgccgggggggggggagtgcgggggagggggggtgtggaaggaaatgcacggcgcgtgtgtaccccccctaaagttgttcctaaagcgaggatatggaggagtggcgggtgccgggggaccggggtgatctctggcacgcgggggtgggaagggtcgggggaggggggatggggtaccggcccacctggccgacgcgggtgcgcgtgcctctgcacaccaaccccacgtcccccggcggtctctaagaagcaccgccccccctccttcataccaccgagcatgcctgggtgtgggttggtaaccaacacgcccatcccctcgtctcctgtgattctctggctgcaccgcattcttgttttctaactatgttcctgtttctgtctccccccccacccctccgccccaccccccaacacccacgtctgtggtgtggccgacccccttttgggcgccccgtcccgccccgccacccctcccgtcctttgttgccctatagtgtagttaacccccccccgccctttgtggcggccagaggccaggtcagtccgggcgggcaggcgctcgcggaaacttaacacccacacccaacccactgtggttctggctccatgccagtggcaggatgctttcggggatcggtggtcaggcagcccgggccgcggctctgtggttaacaccagagcctgcccaacatggcacccccactcccacgcacccccactcccacgcacccccactcccacgcacccccactcccacgcacccccactcccacgcacccccactcccacgcacccccactcccacgcacccccactcccacgcacccccactcccacgcacccccgagatccatccaacacagacagggaaaagatacaaaagtaaacctttatttcccaatagacagcaaaaatcccctgagttttttattagggccaacactaaagacccgctggtgtgtggtgcccgtgtctttcacttttcccctccccgacacggattggctggtgtagtgggcgcggccagagaccacccagcgcccgacccccccctccccacaaacacggggggcgtcccttattgttttccctcgtcccgggtcgacgccccctgctccccggaccacgggtgccgagaccgcaggctgcggaagtccagggcgcccactagggtgccctggtcgaacagcatgttccccacgggggtcatccagaggctgttccactccgacgcgggggccgtcgggtactcggggggcatcacgtggttacccgcggtctcggggagcagggtgcggcggctccagccggggaccgcggcccgcagccgggtcgccatgtttcccgtctggtccaccaggaccacgtacgccccgatgttccccgtctccatgtccaggatgggcaggcagtcccccgtgatcgtcttgttcacgtaaggcgacagggcgaccacgctagagacccccgagatgggcaggtagcgcgtgaggccgcccgcgggggcggccccggaagtctccgcgtggcgcgtcttccgggcacacttcctcggcccccgcggcccagaagcagcgcgggggccgagggaggtttcctcttgtctccctcccagggcaccgacggccccgcccgaggaggcggaagcggaggaggacgcggccccggcggcggaagaggcggcccccgcgggagtcggggccgaggaggaagaggcagaggaggaagaggcggaggccgccgaggacgtcaggggggtcccgggcccaccctggccgcgcccccccggccctgagtcggagggggggtgcgtcgccgccctcttggcccctgccggcgcgagggggggacgcgtggactggggggaggggttttcctggcccgacccgcgcctcttcctcggacgcaccgccgcctcctgctcgacagaggcggcggaggggagcgggggggcgccggagggggcggcgccgcgggagggcccgtgtccaccctccacgcccggcccccccgagccgcgcgccaccgtcgcacgcgcccggcacagactctgttcttggttcgcggcctgagccagggacgagtgcgactggggcacacggcgcgcgtccgcgggggccggggcgcgggggccgggccccggaggcggcgctcgcacgcacggggccacggccgcgcgggggcgcgcgggtcccgacgcggccgaggacgcggtgggcccggggcggggggcggagcctggcatgggcgccgcggggggcctgtggggagaggccgggggggagtcgctgatcactatggggtctctgttgtttgcaaggggggcgggtctgttgacaagggggcccgtccggcccctcggccgccccgcctccgcttcaacaaccccaaccccaaccccaacccccccggaggggccagacgccccccgcggcgccgcggctcgcgactggcgggagccgccgccgccgccgctgctgttggtggtggtgttggtgttactgctgccgtgtggcccgatgggcgccgaggggggcgctgtccgagccgcggccggctggggggctgcgtgagacgccccgcccgtcacggggggcgcggcggcgcctctgcgtgggggggcgcggggcgtccggcggggggcgggcggtacgtagtctgctgcaagagacaacggggggcgcgatcaggttacgccccctcccaggccctccctttccgcgcccgccctttcctcgcccccccgcccgcctattcctccctcccccctcctcctcctcctcccccagggtcctcgccgcccccccgcctcaccgtcgtccaggtcgtcgtcatcctcgtccgtggtgggctcagggtgggtgggcgacagggccctcaccgtgtgcccccccagggtcaggtaccgcggggcgaaccgctgattgcccgtccagataaagtccacggccgtgcccgccctgacggcctcctcggcctccatgcgggtctgggggtcgttcacgatcgggatggtgctgaacgacccgctgggcgtcacgcccactatcaggtacaccagcttggcgttgcacagcgggcaggtgttgcgcaattgcatccaggttttcatgcacgggatgcagaagcggtgcatgcacgggaaggtgtcgcagcgcaggtggggcgcgatctcatccgtgcacacggcgcacacgtcgccctcgtcgctccccccgtcctctcgagggggggcgcccccgcaactgccggggtcttcctcgcggggggggctcccccccgagaccgcccccccatccacgccctgcggccccagcagccccgtctcgaacagttccgtgtccgtgctgtccgcctcggaggcggagtcgtcgtcatggtggtcggcgtccccccgcccccccacttcggtctccgcctcagagtcgctgctgtccggcaggtctcggtcgcagggaaacacccagacatccggggcgggctaaggggaaaaaaaggggggcgggtaagaatggggggatttcccgcgtcaatcagcgcccacgagttccccctctccccccccccgcctcacaaagtcctgcccccctgctggcctcggaagaggggggagaaaggggtctgcaaccaaaggtggtctgggtccgtcctttggatcccgacccctcttcttccctcttctcccgccctccagacgcaccggagtcgggggtcccacggcgtcccccaaatatggcgggcggctcctccccacccccctagatgcgtgtgagtaagggggccctgcgtatgagtcagtggggaccacgccccctaacacggcgaccccggtccctgtgtgtttgttgtgggggcgtgtctctgtgtatgagtcagggggtcccacggcgaccccgggccctgcgtctgagtcaaaggggccatgtgtatgtgttggggggtctgtatatataaagtcagggggtcacatggcgacccccaacagggcgaccccggtccctgtatatatagggtcagggggttccgcgccccctaacatggcgcccccggtccctgtatatatagtgtcacggggttccacgccccctaacatggcgcccggctcccgtgtatgagtgggggtcccccaacatggcggccggttccagtgtaagggtcgggggtcccccaacatggcgccccccaatatggcgccccccaatatggcgccccagacatggcgcccggcccctcacctcgcgctgggggcggccctcaggccggcgggtactcgctccggggcggggctccatgggggtcgtatgcggttggagggtcgcggacggagggtccctgggggtcgcaacgtaggcggggcttctgtggtgatgcggagagggggcggcccgagtctgcctggctgctgcgtctcgctccgagtgccgaggtgcaaatgcgaccagactgtcgggccagggctaacttataccccacgcctttcccctccccaaaggggcggcagtgacgattcccccaatggccgcgcgtcccaggggaggcaggcccaccgcggggcggccccgtccccggggaccaacccggcgcccccaaagaatatcattagcatgcacggcccggcccccgatttgggggaccaacccggtgtcccccaaagaaccccattagcatgcccctcccaccgacgcaacaggggcttggcctgcgtcggtgccccggggcttcccgccttcccgaagaaactcattaccatacccggaaccccaggggaccaatgcgggttcattgagcgacccgcgggccaatgcgcgagggccgtgtgttccgccaaaaaagcaattagcataacccggaaccccaggggagtggttacgcgcggcgcgggaggcggggaataccggggttgcccattaagggccgcgggaattgccggaagcgggaagggcggccggggccgcccattaatgagtttctaattaccataccgggaagcggaacaaggcctcttgcaagtttttaattaccataccgggaagtgggcggcccggcccattgggcggtaactcccgcccaatgggccgggccccgaagactcggcggacgctggttggccgggccccgccgcgctggcggccgccgattggccagtcccgcccccgaggcggcccgccctgtgagggcgggctggctccaagcgtatatatgcgcggctcctgccatcgtctctccggatctagagatctccggaattaattcgccctatagtgagtcggaattttaaccgccaccgccagagccacctccacctgacccgccgcctcctagatcttcttctgagatgagtttttgttctgaattcccgataggaatccccactgtgttgacctggtccttgagtcccagcaggctgtaggcaatacgcttctggtggccaggaagacgcactccgatccttttgatgtcttcgttggacatctgtaccaccttctcgatggccgtgtagccagccaccatgaagtgttccgtgtactgttgcatcttgatgctctccagccactcggacaccgtacggaaggggactccctccgagccgctggtgctgggcagccggatggacactcggggatcaaagtcagccagcgtcttgagggagtcgggggctcggatgagcttgtccaggatgctaacgatgtcggcaaacttgggtcggcgggagcgctcttgctgccagcactgcatcatgagctggtaaatggctgaagggcagtccatgggcgtagggagccggaagccgtcgttgatggctttcatgacctcgtggtttgacagttcccagtagggccgttcgccataagtcatcacttcccacatgacaatgccgtagctccacacatcgctggctgaggtgaacttgcggtaggaaatggcctctggggctgtccatcgaatagggatcttgccgccacttgtggtgtaggtggcctcggggtcatcttccagcacacgcgacaggccaaaatcggacaccttgcacaccaggttgctgttgacgaggatgttgcgggcggccaggtcccggtgcacgtagttcatgttggccaggtacttcatgccggatgcgatacccctcagcatgcccaccaactgaagtacactgaactcaccatccttctccctaaggaacttgtctagcgctccattctccatgtactctgtgataatcatcatgggtttgtatttagagaccacgccctccaggcggatgatattgtggtggctaaactggcccatgatgctggcctcgctcaggaagtccacccgctgcttctcagtgtagcccgctttcagtgtcttgatggccaccggtatctccttcttccccgaggatgccttcagcgtccctttatagacctctccaaactctcctgctccaatgaccttctgccttgccacacaggatgggtggatctcggtggtaaacttgagtacagcctggttggggtcttcgtaagtgtgaggatccacataggtcttcaggggctttagttgttctgacttggaaaaacggacaacttcctttccctgtgccgccgcggccgccagcgcgcaaccccacagcagcgccaggcagaaaccgactgcccggagctccatggtcgacccgggatccggtaccactttgtgcggccagcttcctaggagatcctctagctagagtcggtgtcttctatggaggtcaaaacagcgtggatggcgtctccaggcgatctgacggttcactaaaccagctctgcttatatagagctcggggagcagaagcgcgcgaacagaagcgagaagcgaactgattggttagttcaaataaggcacagggtcatttcaggtccttggggcaccctggaaacatctgatggttctctagaaactgctgagggcgggaccgcatctggggaccatctgttcttggccctgagcggggcaggaactgcttaccacagatatcctgtttggcccatattctcctgttccaactgttcttggccctgagcggggcaggaactgcttaccacagatatcctgtttggcccatattctcctgtttctctgttcctgaccttgatcctagcttgccaaacctacaggtggggtctttcattcccataggcggttacctgggactgtgcggttgggacggcgcccgtgggcccgggcggccgggggcggcgggggccgcgatggcggcggcggcgggccatggagacagagagcgtgccggggtggtagagtttgacaggcaagcatgtgcgtgcagaggcgagtagtgcttgcctgtctaactcgctcgtctcggccgcggggggcccgggctgcgccgccgcgctttaaagggccgcgcgcgacccccggggggtgtgtttcggggggggcccgttttccgctcctccccccgctcctccccccgctcctccccccgctcctccccccgctcctccccccgctcctccccccgctcctccccccgctcctccccccgctcctccccccgctcctccccccgctcctccccccgctcctccccccgctcctccccccgctcctccccccgctcctccccccgctcctccccccgctcctccccccgctcctccccccgctccccaacgcccgccgcgcgcgcgcacgccgcccggaccgccgcccgccttttttgcgcgccgccccgcccgcggggggcccgggctgccacaggtgtaacaacaccaacagaacaccaacagcacggcgcaccggcgactccggttcctcatccacacgtcacacgtcacgtcatccaccacacctgcccaccaacacaactcacagcgacaactcaccgcgcaacaactcctgttcctcatccacacgtcaccgcgcaccccccgctcctccagacgtcccccagcgcaacacgccgctcctgtcacacaccaccgccccagccctccccagccccagccctccccagccccagccctccccggccccagccctccccggccccagccctccccggccccagccctccccggccccagccctccccggccccagccctccccggccccagccctccccggccgcgtcccgcgctccctcgggggggttcgggcatctctacctcagtgccgccaatctcaggtcagagatccaaaccctccgggggcgcccgcgcaccaccaccgcccctcgccccctcccgcccctcgccccctcccgcccctcgccccctcccgcccctcgccccctcccgcccctcgccccctcccgcccctcgccccctcccgcccctcgccccctcccgcccctcgccccctcccgcccctcgccccctcccgcccctcgccccctcccgcccctcgccccctcccgcccctcgccccctcccgcccctcgccccctcccgcccctcgccccctcccgcccctcgccccctcccgcccctcgccccctcccgcccctcgccccctcccgcccctcgccccctcccgcccctcgccccctcccgcccctcgaaataaacaacgctactgcaaaactaaatcaggtcgttgtcgtttattgcgtcttcgggtttcgcaagcgccccgccccgtcccggcccgttacagcaccccgtccccctcgaacgcgccgccgtcgtcgtcgtcccaggcgccttcccagtccacaacttcccgtcgcgggggcgtggccaagcccgcctccgcccccagcacctccacggcccccgccgccgccagcacggtgccgctgcggcccgtggccgaggcccagcgaatcccgggcaacgccggcggcagggcccccgggccgtcgtcgtcgtcgtcgccgccgcgcagcaccagcgggggggcgtcgtcgtcgggctccagcagggcgcgggcgcaaaagtccctccgcggcccgcgccaccgggccgggccggcgcgcaccgcctcgcgccccagcgccacgtacacgggccgcagcggcgcgcccaggccccagcgcgcgcaggcgcggtgcgagtgggcctcctcctcgcagaagtccggcgcgccgggcgccatggcgtcggtggtccccgaggccgccgcccggccgtccagcgccggcagcacggcccggcggtactcgcgcggggacatgggcaccggcgtgtccgggccgaagcgcgtgcgcacgcggtagcgcacgttgccgccgcggcacaggcgcagcggcggcgcgtcggggtacaggcgcgcgtgcgcggcctccacgcgcgcgaagacccccgggccgaacacgcggcccggggccagcaccgtgcggcgcaggtcccgcgccgccggccagcgcacggcgcactgcacggcgggcagcaggtcgcacgccaggtaggcgtgctgccgcgacaccgcgggcccgtcggcgggccagtcgcaggcgcgcacggtgttgaccacgatgagccgccggtcgccggcgctggcgagcagccccagaaactccacggccccggcgaaggccaggtcccgcgtggacagcagcagcacgccctgcgcgcccagcgccgacacgtcgggggcgccggtccagttgcccgcccaggcggccgtgtccggcccgcacagccggttggccagggccgccagcaggcaggacagcccgccgcgctcggcggaccactccggcggcccccccgaggccccgccgccggccaggtcctcgcccggcagcggcgagtacagcaccaccacgcgcacgtcctcggggtcggggatctggcgcatccaggccgccatgcggcgcagcgggcccgaggcgcgcagggggccaaagaggcggcccccggcggccccgtgggggtgggggttatcgtcgtcgtcgccgccgccgcacgcggcctgggcggcggcggcgggcccggcgcaccgcgcggcgatcgaggccagggcccgcgggtcaaacatgagggccggtcgccaggggacggggaacagcgggtggtccgtgagctcggccacggcgcgcggggagcagtaggcctccagggcggcggccgcgggcgccgccgtgtggctgggccccgggggctgccgccgccagccgcccagggggtcggggccctcggcgggccggcgcgacagcgccacggggcgcgggcgggcctgcgccgcggcggcccggggcgccgcgggctgggcgggggcgggctcgggccccgggggcgtggaggggggcgcggggaggggggcgcgggcgtccgagccgggggcgtccgcgccgctcttcttcgtcttcgggggtcgcgggccgccgcctccgggcggccgggccgggccgggactcttgcgcttgcgcccctcccgcggcgcggcggaggcggcggcggccgccagcgcgtcggcggcgtccggtgcgctggcggccgccgccagcagggggcgcaggctctggttctcaaacagcaggtccgcggcggcggcggccgcggagctcggcaggcgcgggtcccgcggcagcgcggggcccagggccccggcgaccaggctcacggcgcgcacggcggccacggcggcctcgctgccgccggccacgcgcaggtccccgcgcaggcgcatgagcaccagcgcgtcgcgcacgaaccgcagctcgcgcagccacgcgcgcaggcggggcgcgtcggcgtgcggcggcggcggggaagcggggcccgcgggtccctccggccgcggggggctggcgggccgggccccggccagccccgggacggccgccaggtcgccgtcgaagccctcggccagcgcctccaggatcccgcggcaggcggccaggcactccacggccacgcggccggcctgggcgcggcgcccggcgtcgtcgtcggcgtcggcgtggcgggcggcgtcggggtcgtcgccccccgcgggggaggcgggcgcggcggacagccgccccagggcggcgaggatccccgcggcgccgtacccggcgggcaccgcgcgctcgcccggtgcggcggcggcggcgacgacggcggcggcgaccccctcgtcatctgcgccggcgccggggctccccgcggcccccgtcagcgccgcgttctcgcgcgccaacaggggcgcgtaggcgcggcgcaggctggtcagcaggaagcccttctgcgcgcggtcgtatcggcggctcatggccacggcggccgccgcgtgcgccaggccccagccgaagcggccggccgccatggcgtagcccaggtggggcacggcccgcgccacgctgccggtgatgaaggagctgctgttgcgcgcggcgcccgagatccggaagcaggcctggtccagcgccacgtccccggggaccacgcgcgggttctggagccaccccatggcctccgcgtccggggtgtacagcagccgcgtgatcagggcgtactgctgcgcggcgtcgcccagctcgggcgcccacacggccgccggggcgcccgaggcctcgaaccggcgtcgcgcctcctccgcctcgggcgccccccagaggcccgggcggctgtcgcccaggccgccgtacagcacccgccccgggggcgggggcccggcgccgggccacggctccccgctgacgtacccgtcgcgatagcgcgcgtagaaggcgccggaggccgcgtcggcgtccagctcgacccgccggggctgcccggccgtgaagcggcccgtggcgtcgcggccggccaccgccgcgcgggcccggcggcgctcgatgcggcccgcggaggccgcgggggtcctcgccgccgcccggggcttgggcgcggcctcggagagggggggtggcccgggcgggggcggcgtccgcccgggggcttccggcgccgcgctcgacggaccccgcccgacggcccgcgcctcgcgtgcgcggtcggccgcgtcgttgccgtcgtcgtcctcgtcctcgtcggacgacgaggacgaagaggatgcggacgacgaggacgaggacccggagtccgacgaggtcgatgacgccgatggccgccgccggccgtgacgacgtctccgcggcggctgggccggcgggcgcggcgacaggcggtccgtggggtccggatacgcgccgcgtagcggggcctcccgtgcgcggccccgggccggggcccggtcgccggcggcgtcggctgcgtcgtcgtactcgtccccgtcatcgtcgtcggctcgaaaggcgggggtccggggcggcgaggccgcggggtcgggcgtcgggatcgtccggacggcctcctctaccatggaggccagcagggccagctgtcgcggcgagacggcgtccccggcgtcctcgccggcgtcggtgcccgccgcgggggccctcccgtcccgccgggcgtcgtcgaggtcgtgggggtggtcggggtcgtggtcggggtcgtccccgccctcctccgtctccgcgccccacccgagggccccccgctcgtcgcggtctgggctcggggtgggcggcggcccgtcggtggggcccggggagccggggcgctgcttgttctccgacgccatcgccgatgcggggcgatcctccggggatacggctgcgacggcggacgtagcacggtaggtcacctacggactctcgatggggagggggcgagacccacggaccccgacgacccccgccgtcgacgcggaactagcgcggaccggtcgatgcttgggtgggaaaaaggacagggacggccgatccccctcccgcgcttcgtccgcgtatcggcgtcccggcgcggcgagcgtctgacggtctgtctctggcggtcccgcgtcgggtcgtggatccgtgtcggcagccgcgctccgtgtggacgatcggggcgtcctcgggctcatatagtcccaggggccggcgggaaggaggagcagcggaggccgccggccccccgccccccaggcgggcccgccccgaacggaattccattatgcacgaccccgccccgacgccggcacgccgggggcccgtggccgcggcccgttggtcgaacccccggccccgcccatccgcgccatctgccatgggcggggcgcgagggcgggtgggcccgcgccccgccccgcatggcatctcattaccgcccgatccggtggtttccgcttccgttccgcatgctaacgaggaacgggccgggggcggggcccgggccccgacttcccggttcggcggtaatgagatacgagccccgcgcgcccgttggccgtccccgggcccccggtcccgcccgccggacgttgggaccaacgggacggcgggcggcccaagggccgcccgccttgccgcccccccattggccggcgggcgggaccgccccaagggggcggggccgccgggtaaaagaagtgagaacgcgaagcgttcgcacttcgtcccaatatatatatattattagggcgaagtgcgagcactggcgccgtgcccgactccgcgccggccccgggggcgggcccgggcggcggggggcgggtctctccggcgcacataaaggcccggcgcgaccgacgcccgcagacggcgccggccacgaacgacgggagcggctgcggagcacgcggaccgggagcgggactcgcagagggccgtcggagcggacggcgtcggcatcgcgacgccccggctcgggatcgggatcgcatcggaaagggacacgcggaaagacccacccaccccacccacgaaacacaggggacgcaccccgggggcctccgacgacagaaacccaccggtccgcctttgtgcacgggtaagcaccttgggtgggcggaggagggggggacgcgggggcggaggaggggggacgcgggggcggaggaggggggacgcgggggcggaggaggggggacgcgggggcggaggaggggggacgcgggggcggaggagggggctcacccgcgttcgtgccttcccgcaggaggaacgtcctcgtcgaggcgaccggcggcgaccgttgcgtggaccgcttcctgctcgtcgggcggggggaagccactgtggtcctccgggacgttttctggatggccgacatttccccaggcgcttttgcgccttgtgtaaaagcgcggcgtcccgctctccgatccccgcccctgggcacgcgcaagcgcaagcgcccttcccgccccctctcatcggagtctgaggtagaatccgatacagccttggagtctgaggtcgaatccgagacagcatcggattcgaccgagtctggggaccaggatgaagccccccgcatcggtggccgtagggccccccggaggcttggggggcggttttttctggacatgtcggcggaatccaccacggggacggaaacggatgcgtcggtgtcggacgaccccgacgacacgtccgactggtcttatgacgacattcccccacgacccaagcgggcccgggtaaacctgcggctcacgagctctcccgatcggcgggatggggttatttttcctaagatggggcgggtccggtctacccgggaaacgcagccccgggcccccaccccgtcggccccaagcccaaatgcaatgctacggcgctcggtgcgccaggcccagaggcggagcagcgcacgatggacccccgacctgggctacatgcgccagtgtatcaatcagctgtttcgggtcctgcgggtcgcccgggacccccacggcagtgccaaccgcctgcgccacctgatacgcgactgttacctgatgggatactgccgagcccgtctggccccgcgcacgtggtgccgtttgctgcaggtgtccggcggaacctggggcatgcacctgcgcaacaccatacgggaggtggaggctcgattcgacgccaccgcggaacccgtgtgcaagcttccttgtttggagaccagacggtacggcccggagtgtgatcttagtaatctcgagattcatctcagcgcgacaagcgatgatgaaatctccgatgccaccgatctggaggccgccggttcggaccacacgctcgcgtcccagtccgacacggaggatgccccctcccccgttacgctggaaaccccagaaccccgcgggtccctcgctgtgcgtctggaggatgagtttggggagtttgactggaccccccaggagggctcccagccctggctgtctgcggtcgtggccgataccagctccgtggaacgcccgggcccatccgattctggggcgggtcgcgccgcagaagaccgcaagtgtctggacggctgccggaaaatgcgcttctccaccgcctgcccctatccgtgcagcgacacgtttctccggccgtgagtccggtcgccccgacccccttgtatgtccccaaataaaagaccaaaatcaaagcgtttgtcccagcgtcttaatggcgggaagggcggagagaaacagaccacgcgtacatggggggtgtttgggggtttattgacatcggggctacagggtggtaaccggatagcagatgtgaggaagtctgggccgttcgccgcgaacggcgatcagagggtccgtttcttgcggaccacggcccggtgatgtgggttgctcgtctgggatctcgggcatgcccatacacgcacaacacggacgccgcaccggatgggacgtcgtaagggggcctggggtagctgggtggggtttgtgcagagcaatcagggaccgcagccagcgcatacaatcgcgctcccgtccgtttgtcccgggcagtaccacgccgtactggtattcgtaccggctgagcagggtctccagggggtggttgggggccgcggggaacggggtccacgccacggtccactcgggcaaaaaccgagtcggcacggcccacggttctcccacccacgcgtctggggtcttgatggcgataaatcttaccccgagccggattttttgggcgtattcgagaaacggcacacacagatccgccgcgcctaccacccacaagtggtagaggcgaggggggctgggttggtctcggtgcagcagtcggaagcacgccacggcgtccacgacctcggtgctctccaaggggctgtcctccgcaaacaggcccgtggtggtgtttggggggcagcgacaggacctagtgcgcacgatcgggcgggtgggtttgggtaagtccatcagcggctcggccaaccgtcgaaggttggccggacgaacgacgaccggggtacccaggggttctgatgccaaaatgcggcactgcctaagcaggaagctccacagggccgggcttgcgtcgacggaagtccggggcagggcgttgttctggtcaaggagggtcattacgttgacgacaacaacgcccatgttggtatattacaggcccgtgtccgatttggggcacttgcagatttgtaaggccacgcacggcggggagacaggccgacgcgggggctgctctaaaaatttaagggccctacggtccacagacccgccttcccgggggggcccttggagcgaccggcagcggaggcgtccgggggaggggagggtgatttacgggggggtaggtcagggggtgggtcgtcaaactgccgctccttaaaaccccggggcccgtcgttcggggtgctcgttggttggcactcacggtgcggcgaatggcctgtcgtaagttttgtcgcgtttacgggggacagggcaggaggaaggaggaggccgtcccgccggagacaaagccgtcccgggtgtttcctcatggccccttttataccccagccgaggacgcgtgcctggactccccgcccccggagacccccaaaccttcccacaccacaccacccggcgatgccgagcgcctgtgtcatctgcaggagatcctggcccagatgtacggaaaccaggactaccccatagaggacgaccccagcgcggatgccgcggacgatgtcgacgaggacgccccggacgacgtggcctatccggaggaatacgcagaggagctttttctgcccggggacgcgcccggtccccttatcggggccaacgaccacatccctcccccgtgtggcgcatctccccccggtatacgacgacgcagccgggatgagattggggccacgggatttaccgcggaagaactggacgccatggacagggaggcggctcgagccatcagccgcggcggcaagcccccctcgaccatggccaagctggtgactggcatgggctttacgatccacggagcgctcaccccaggatcggaggggtgtgtctttgacagcagccacccagattacccccaacgggtaatcgtgaaggcggggtggtacacgagcacgagccacgaggcgcgactgctgaggcgactggaccaccccgcgatcctgcccctcctggacctgcatgtcgtctccggggtcacgtgtctggtcctccccaagtaccaggccgacctgtatacctatctgagtaggcgcctgaacccgctgggacgcccgcagatcgcagcggtctcccggcagctcctaagcgccgttgactacattcaccgccagggcattatccaccgcgacattaagaccgaaaatatttttattaacacccccgaggacatttgcctgggggactttggtgccgcgtgcttcgtgcagggttcccgatcaagccccttcccctacggaatcgccggaaccatcgacaccaacgcccccgaggtcctggccggggatccgtataccaccaccgtcgacatttggagcgccggtctggtgatcttcgagactgccgtccacaacgcgtccttgttctcggccccccgcggccccaaaaggggcccgtgcgacagtcagatcacccgcatcatccgacaggcccaggtccacgttgacgagttttccccgcatccagaatcgcgcctcacctcgcgctaccgctcccgcgcggccgggaacaatcgcccgccgtacacccgaccggcctggacccgctactacaagatggacatagacgtcgaatatctggtttgcaaagccctcaccttcgacggcgcgcttcgccccagcgccgcagagctgctttgtttgccgctgtttcaacagaaatgaccgcccccagggggcggtgctgtttgcgggttggcacaaaaagaccccgacccgcgtctgtggtgtttttggcatcatgtcgccgggcgccatgcgtgccgttgttcccattatcccattccttttggttcttgtcggtgtatcgggggttcccaccaacgtctcctccaccacccaaccccaactccagaccaccggtcgtccctcgcatgaagcccccaacatgacccagaccggcaccaccgactctcccaccgccatcagccttaccacgcccgaccacacaccccccatgccaagtatcggactggaggaggaggaagaggaggagggggccggggacggcgaacatcttgaggggggagatgggacccgtgacaccctaccccagtccccgggcccagccttcccgttggctgaggacgtcgagaaggacaaacccaaccgtcccgtagtcccatcccccgatcccaacaactcccccgcgcgccccgagaccagtcgcccgaagacaccccccaccattatcgggccgctggcaactcgccccacgacccgactcacctcaaagggacgacccttggttccgacgcctcaacataccccgctgttctcgttcctcactgcctcccccgccctggacaccctcttcgtcgtcagcaccgtcatccacaccttatcgtttttgtgtattggtgcgatggcgacacacctgtgtggcggttggtccagacgcgggcgacgcacacaccctagcgtgcgttacgtgtgcctgccgtccgaacgcgggtagggtatggggcgggggatggggagagcccacacgcggaaagcaagaacaataaaggcggtggtatctagttgatatgcatctctgggtgtttttggggtgtggcggacgcggggcggtcattggacggggtgcagttaaatacatgcccgggacccatgaagcatgcgcgacttccgggcctcggaacccacccgaaacggccaacggacgtctgagccaggcctggctatccggagaaacagcacacgacttggcgttctgtgtgtcgcgatgtctctgcgcgcagtctggcatctggggcttttgggaagcctcgtgggggctgttcttgccgccacccatcggggacctgcggccaacacaacggaccccttaacgcacgccccagtgtcccctcaccccagccccctggggggctttgccgtccccctcgtagtcggtgggctgtgcgccgtagtcctgggggcggcgtgtctgcttgagctcctgcgtcgtacgtgccgcgggtgggggcgttaccatccctacatggacccagttgtcgtataatttcccccccccccccccttctccgcatgggtgatgtcgggtccaaactcccgacaccaccagctggtatggtataaatcaccggtgcgccccccaaaccatgtccggcagggggatgggggggcgaatgcggagggcacccaacaacaccgggctaaccaggaaatccgtggccccggcccccaataaagatcgcggtagcccggccgtgtgacactatcgtccataccgaccacaccgacgaatcccctaagggggaggggccattttacgaggaggaggggtataacaaagtctgtctttaaaaagcaggggttagggagttgttcggtcataagcttcagcgcgaacgaccaactaccccgatcatcagttatccttaaggtctcttttgtgtggtgcgttccggtatggggggggctgccgccaggttgggggccgtgattttgtttgtcgtcatagtgggcctccatggggtccgcggcaaatatgccttggcggatgcctctctcaagatggccgaccccaatcgctttcgcggcaaagaccttccggtcctggaccagctgaccgaccctccgggggtccggcgcgtgtaccacatccaggcgggcctaccggacccgttccagccccccagcctcccgatcacggtttactacgccgtgttggagcgcgcctgccgcagcgtgctcctaaacgcaccgtcggaggccccccagattgtccgcggggcctccgaagacgtccggaaacaaccctacaacctgaccatcgcttggtttcggatgggaggcaactgtgctatccccatcacggtcatggagtacaccgaatgctcctacaacaagtctctgggggcctgtcccatccgaacgcagccccgctggaactactatgacagcttcagcgccgtcagcgaggataacctggggttcctgatgcacgcccccgcgtttgagaccgccggcacgtacctgcggctcgtgaagataaacgactggacggagattacacagtttatcctggagcaccgagccaagggctcctgtaagtacgccctcccgctgcgcatccccccgtcagcctgcctgtccccccaggcctaccagcagggggtgacggtggacagcatcgggatgctgccccgcttcatccccgagaaccagcgcaccgtcgccgtatacagcttgaagatcgccgggtggcacgggcccaaggccccatacacgagcaccctgctgcccccggagctgtccgagacccccaacgccacgcagccagaactcgccccggaagaccccgaggattcggccctcttggaggaccccgtggggacggtggcgccgcaaatcccaccaaactggcacataccgtcgatccaggacgccgcgacgccttaccatcccccggccaccccgaacaacatgggcctgatcgccggcgcggtgggcggcagtctcctggcagccctggtcatttgcggaattgtgtactggatgcgccgccgcactcaaaaagccccaaagcgcatacgcctcccccacatccgggaagacgaccagccgtcctcgcaccagcccttgttttactagatacccccccttaatgggtgcgggggggtcaggtctgcggggttgggatgggaccttaactccatataaagcgagtctggaaggggggaaaggcggacagtcgataagtcggtagcgggggacgcgcacctgttccgcctgtcgcacccacagctttttttgcgaaccgtcccgttccgggatgccgtgccgcccgttgcagggcctggtgctcgtgggcctctgggtctgtgccaccagcctggttgtccgtggccccacggtcagtctggtatcaaactcatttgtggacgccggggccttggggcccgacggcgtagtggaggaagacctgcttattctcggggagcttcgctttgtgggggaccaggtcccccacaccacctactacgatggggtcgtagagctgtggcactaccccatgggacacaaatgcccacgggtcgtgcatgtcgtcacggtgaccgcgtgcccacgtcgccccgccgtggctttcgccctgtgtcgcgcaaccgacagcactcacagccccgcatatcccaccctggagctgaatctggcccaacagccgcttttgcgggtccggagggcgacgcgtgactatgccggggtgtacgtgttacgcgtatgggtcggggacgcaccaaacgccagcctgtttgtcctggggatggccatagccgccgaagggactctggcgtacaacggctcggcccatggctcctgcgacccgaaactgcttccgtattcggccccgcgtctggccccggcgagcgtataccaacccgcccctaacccggcctccaccccctcgaccaccacctccaccccctcgaccaccacctccaccccctcgaccaccatccccgctccccaagcatcgaccacacccttccccacgggagacccaaaaccccaacctcacggggtcaaccacgaacccccatcgaatgccacgcgagcgacccgcgactcgcgatacgcgctaacggtgacccagataatccagatagccatccccgcgtccattatagccctggtgtttctggggagctgtatttgctttatacacagatgtcaacgccgctaccgacgctcccgccgcccgatttacaacccccagatacccactggcatctcatgcgcggtgaacgaagcggccatggcccgcctcggagccgagctcaaatcgcatccgagcaccccccccaaatcccggcgccggtcgtcacgcacaccaatgccctccctgacggccatcgccgaagagtcggagcccgcgggggcggctgggcttccgacgccccccgtggaccccacgacatccaccccaacgcctcccctgttggtataggtccacggccactggccgggggcaccacataaccgaccgcagtcactgagttgggaataaaccggtattatttacctatatacgtgtatgtccatttcttcccccccccccccggaaaccaaagaaggaaacaaagaatggatgggaggagttcaggaagccggggagagggcccgcggcgcatttaaggcgttgttgtgttgactttggctcttctggcgggttggtgcggtgctgtttgttgggctcccattttacccgaagatcggctgctatccccgggacatggatcgcggggcggtggtggggtttcttctcggtgtttgtgttgtatcgtgcttggcgggaacgcccaaaacgtcctggagacgggtgagtgtcggcgaggacgtttcgttgcttccagctccggggcctacggggcgcggcccgacccagaaactactatgggccgtggaacccctggatgggtgcggccccttacacccgtcgtgggtctcgctgatgccccccaagcaggtgcccgagacggtcgtggatgcggcgtgcatgcgcgctccggtcccgctggcgatggcgtacgcccccccggccccatctgcgaccgggggtctacggacggacttcgtgtggcaggagcgcgcggccgtggttaaccggagtctggttatttacggggtccgagagacggacagcggcctgtataccctgtctgtgggcgacataaaggacccggctcgccaagtggcctcggtggtcctggtggtgcaaccggccccagttccgaccccacccccgaccccagccgattacgacgaggatgacaatgacgagggcgagggcgaggacgaaagtctagccggcactcccgccagcgggaccccccggctcccgcctccccccgcccccccgaggtcttggcccagcgcccccgaagtctcacacgtgcgtggggtgaccgtgcgtatggagactccggaagctatcctgttttcccccggggaggcgtttagcacgaacgtctccatccatgccatcgcccacgacgaccagacctacaccatggacgtcgtctggttgaggttcgacgtgccgacctcgtgtgccgagatgcgaatatacgaatcgtgtctgtatcacccgcagctcccagagtgtctgtccccggccgacgctccgtgcgccgcgagtacgtggacgtctcgcctggccgtccgcagctacgcggggtgttccagaacaaaccccccgccgcgctgttcggccgaggctcacatggagcccttcccggggctggcgtggcaggcggcctccgtcaatctggagttccgggacgcgtccccacaacactccggcctgtatctgtgcgtggtgtacgtcaacgaccatattcacgcatggggccacattaccatcagcaccgcggcgcagtaccggaacgcggtggtggaacagcccctcccacagcgcggcgcggatttggccgagcccacccacccgcacgtcggggcccctccccacgcgcccccaacccacggcgccctgcggttaggggcggtgatgggggccgccctgctgctgtctgcgctggggttgtcggtgtgggcgtgtatgacctgttggcgcaggcgtgcctggcgggcggttaaaagcagggcctcgggtaaggggcccacgtacattcgcgtggccgacagcgagctgtacgcggactggagctcggacagcgagggagaacgcgaccaggtcccgtggctggcccccccggagagacccgactctccctccaccaatggatccggctttgagatcttatcaccaacggctccgtctgtatacccccgtagcgatgggcatcaatctcgccgccagctcacaacctttggatccggaaggcccgatcgccgttactcccaggcctccgattcgtccgtcttctggtaaggcgccccatcccgaggccccacgtcggtcgccgaactgggcgaccgccggcgaggtggacgtcggagacgagctaatcgcgatttccgacgaacgcggacccccccgacatgaccgcccgcccctcgccacgtcgaccgcgccctcgccacacccgcgacccccgggctacacggccgttgtctccccgatggccctccaggctgtcgacgccccctccctgtttgtcgcctggctggccgctcggtggctccggggggcttccggcctgggggccgtcctgtgtgggattgcgtggtatgtgacgtcaattgcccgaggcgcataaagggccggtggtccgcctagccgcagcaaattaaaaatcgtgagtcactgcgaccgcaacttcccacccggagctttcttccggcctcgatgacgtcccggctctccgatcccaactcctcagcgcgatccgacatgtccgtgccgctttatcccacggcctcgccagtttcggtcgaagcctactactcggaaagcgaagacgaggcggccaacgacttcctcgtacgcatgggccgccaacagtcggtattaaggcgtcgacgcagacgcacccgctgcgtcggcatggtgatcgcctgtctcctcgtggccgttctgtcgggcggatttggggcgctcctgatgtggctgctccgctaaaagaccgcatcgacacgcgcgtccttcttgtcgtctctcttcccccccatcaccccgcaatttgcacccagcctttaactacattaaattgggttcgattggcaatgttgtctcccggttgatttttgggtgggtggggagtgggtgggtggggagtgggtgggtggggagtgggtgggtggggagtgggtgggtggggagtgggtgggtggggagtgggtgggtggggagtgggtgggtggggagtgggtgggtggggagtgggtgggtggggagtggcaaggaagaaacaagcccgaccaccagacagaaaatgtaaccatacccaaaccgactctgggggctgtttgtggggtcggaaccataggatgaacaaaccaccccgtacctcccgcacccttgggtgcgggtggctcatcggcatctgtccggtatgggttgttccccacccacttgcgttcggacgtcttagaatcatggcggttttctatgccgacatcggttttctcccccgcaataagacacgatgcgataaaatctgtttgtgaaatttattaagggtacaaattgccctagcacaggggtggggttagggccgggtccccacacccaaacgcaccaaacagatgcaggcagtgggtcgagtacagccccgcgtacgaacacgtcgatgcgtgtgtcagacagcaccagaaagcacaggccatcaacaggtcgtgcatatgtcggtgggtttggacgcggggggccatggtggtgataaagttaatggccgccgtccgccagggccacaggggcgacgtctcttggttggcccggagccactgggtgtggaccagccgcgcgtggcggcccaacatggcccctgtagccgggggcgggggatcgcgcacgtttgcagcgcacatgcgagacacctcgaccacggttcggaagaaggcccggtggtccgcgggcaacatcaccaggtgcgcaagcgcccgggcgtccagagggtagagccctgagtcatccgaggttggctcatcgcccgggtcatgccgcaagtgcgtgtgggttgggcttccggtgggcgggacgcgaaccgcggtgtggagccctacgcgggcccgagcgtacgctccatcttgtggggagaaggggtctgggctcgccaggggggcatacttgcccgggctatacagacccgcgagccgtacgtggttcgcggggggtgcgtggggtccggggctcccggggaggccggggctcccggggttgtcgtggatccctggggtcacgcggtaccctggggtctctgggagctcgcggtactctgggttccctaggttctcggggtggtcgcggaacccggggctcccggggaacacgcggtgtcctggggattgttggcggtcggacggcttcagatggcttcgagatcgtagtgtccgcaccgactcgtagtagacccgaatctccacattgccccgccgcttgatcattatcaccccgttgcgggggtccggagatcatgcgcgggtgtcctcgaggtgcgtgaacacctctggggtgcatgccggcggacggcacgccttttaagtaaacatctgggtcgcccggcccaactggggccgggggttgggtctggctcatctcgagagccacggggggaaccaccctccgcccagaaacttgggcgatggtcgtacccgggactcaacgggttaccggattacggggactgtcggtcacggtcccgccggttcttcgatgtgccacacccaaggatgcgttgggggcgattttgggcagcagcccgggagagcgcagcagaggacgctccgggtcgtgcacggcggttttggccgcctcccggtcctcacgcccccttttattgatctcatcgcgtacgtcggcgtacgtcctgggcccaacccgcatgttgtccaggaaggtgtccgccatttccagggcccacgacatgctcccccgcccgacgagcaggaagcggtccacgcaacggtcgccgccggtcgccccgacgagcaggaagcggtccacgcaacggtcgccgccggtcgcctcgacgaggacgttcctcctgcgggaaggcacgaacgcgggtgagccccctcctccgcccccgcgtcccccctcctccgcccccgcgtcccccctcctccgcccccgcgtcccccctcctccgcccccgcgtcccccctcctccgcccccgcgtcccccctcctccgcccccgcgtcccccctcctccacccccgcgtccccccctcctccgcccacccaaggtgcttacccgtgcacaaaggcggaccggtgggtttctgtcgtcggaggcccccggggtgcgtcccctgtgtttcgtgggtggggtgggtgggtctttccgcgtgtccctttccgatgcgatcccgatcccgagccggggcgtcgcgatgccgacgccgtccgctccgacggccctctgcgagtcccgctcccggtccgcgtgctccgcagccgctcccgtcgttcgtggccggcgccgtctgcgggcgtcggtcgcgccgggcctttatgtgcgccggagagacccgccccccgccgcccgggcccgcccccggggccggcgcggagtcgggcacggcgccagtgctcgcacttcgccctaataatatatatatattgggacgaagtgcgaacgcttcgcgttctcacttcttttacccggcggccccgcccccttggggcggtcccgcccgccggccaatgggggggcggcaaggcgggcggcccttgggccgcccgccgtcccgttggtcccaacgtccggcgggcgggaccgggggcccggggacggccaacgggcgcgcggggctcgtatctcattaccgccgaaccgggaagtcggggcccgggccccgcccccggcccgttcctcgttagcatgcggaacggaagcggaaaccaccggatcgggcggtaatgagatgccatgcggggcggggcgcgggcccacccgccctcgcgccccgcccatggcagatggcgcggatgggcggggccgggggttcgaccaacgggccgcggccacgggcccccggcgtgccggcgtcggggcggggtcgtgcataatggaattccgttcggggcgggcccgcctggggggcggggggccggcggcctccgctgctcctccttcccgccggcccctgggactatatgagcccgaggacgccccgatcgtccacacggagcgcggctgccgacacggatccacgacccgacgcgggaccgccagagacagaccgtcagacgctcgccgcgccgggacgccgatacgcggacgaagcgcgggagggggatcggccgtccctgtcctttttcccacccaagcatcgaccggtccgcgctagttccgcgtcgacggcgggggtcgtcggggtccgtgggtctcgccccctccccatcgagagtccgtaggtgacctaccgtgctacgtccgccgtcgcagccgtatccccggaggatcgccccgcatcggcgatggcgtcggagaacaagcagcgccccggctccccgggccccaccgacgggccgccgcccaccccgagcccagaccgcgacgagcggggggccctcgggtggggcgcggagacggaggagggcggggacgaccccgaccacgaccccgaccacccccacgacctcgacgacgcccggcgggacgggagggcccccgcggcgggcaccgacgccggcgaggacgccggggacgccgtctcgccgcgacagctggccctgctggcctccatggtagaggaggccgtccggacgatcccgacgcccgaccccgcggcctcgccgccccggacccccgcctttcgagccgacgacgatgacggggacgagtacgacgacgcagccgacgccgccggcgaccgggccccggcccggggccgcgcacgggaggccccgctacgcggcgcgtatccggaccccacggaccgcctgtcgccgcgcccgccggcccagccgccgcggagacgtcgtcacggccggcggcggccatcggcgtcatcgacctcgtcggactccgggtcctcgtcctcgtcgtccgcatcctcttcgtcctcgtcgtccgacgaggacgaggacgacgacggcaacgacgcggccgaccgcgcacgcgaggcgcgggccgtcgggcggggtccgtcgagcgcggcgccggaagcccccgggcggacgccgcccccgcccgggccaccccccctctccgaggccgcgcccaagccccgggcggcggcgaggacccccgcggcctccgcgggccgcatcgagcgccgccgggcccgcgcggcggtggccggccgcgacgccacgggccgcttcacggccgggcagccccggcgggtcgagctggacgccgacgcggcctccggcgccttctacgcgcgctatcgcgacgggtacgtcagcggggagccgtggcccggcgccgggcccccgcccccggggcgggtgctgtacggcggcctgggcgacagccgcccgggcctctggggggcgcccgaggcggaggaggcgcgacgccggttcgaggcctcgggcgccccggcggccgtgtgggcgcccgagctgggcgacgccgcgcagcagtacgccctgatcacgcggctgctgtacaccccggacgcggaggccatggggtggctccagaacccgcgcgtggtccccggggacgtggcgctggaccaggcctgcttccggatctcgggcgccgcgcgcaacagcagctccttcatcaccggcagcgtggcgcgggccgtgccccacctgggctacgccatggcggccggccgcttcggctggggcctggcgcacgcggcggccgccgtggccatgagccgccgatacgaccgcgcgcagaagggcttcctgctgaccagcctgcgccgcgcctacgcgcccctgttggcgcgcgagaacgcggcgctgacgggggccgcggggagccccggcgccggcgcagatgacgagggggtcgccgccgccgtcgtcgccgccgccgccgcaccgggcgagcgcgcggtgcccgccgggtacggcgccgcggggatcctcgccgccctggggcggctgtccgccgcgcccgcctcccccgcggggggcgacgaccccgacgccgcccgccacgccgacgccgacgacgacgccgggcgccgcgcccaggccggccgcgtggccgtggagtgcctggccgcctgccgcgggatcctggaggcgctggccgagggcttcgacggcgacctggcggccgtcccggggctggccggggcccggcccgccagccccccgcggccggagggacccgcgggccccgcttccccgccgccgccgcacgccgacgcgccccgcctgcgcgcgtggctgcgcgagctgcggttcgtgcgcgacgcgctggtgctcatgcgcctgcgcggggacctgcgcgtggccggcggcagcgaggccgccgtggccgccgtgcgcgccgtgagcctggtcgccggggccctgggccccgcgctgccgcgggacccgcgcctgccgagctccgcggccgccgccgccgcggacctgctgtttgagaaccagagcctgcgccccctgctggcggcggccgccagcgcaccggacgccgccgacgcgctggcggccgccgccgcctccgccgcgccgcgggaggggcgcaagcgcaagagtcccggcccggcccggccgcccggaggcggcggcccgcgacccccgaagacgaagaagagcggcgcggacgcccccggctcggacgcccgcgcccccctccccgcgcccccctccacgcccccggggcccgagcccgcccccgcccagcccgcggcgccccgggccgccgcggcgcaggcccgcccgcgccccgtggcgctgtcgcgccggcccgccgagggccccgaccccctgggcggctggcggcggcagcccccggggcccagccacacggcggcgcccgcggccgccgccctggaggcctactgctccccgcgcgccgtggccgagctcacggaccacccgctgttccccgtcccctggcgaccggccctcatgtttgacccgcgggccctggcctcgatcgccgcgcggtgcgccgggcccgccgccgccgcccaggccgcgtgcggcggcggcgacgacgacgataacccccacccccacggggccgccgggggccgcctctttggccccctgcgcgcctcgggcccgctgcgccgcatggcggcctggatgcgccagatccccgaccccgaggacgtgcgcgtggtggtgctgtactcgccgctgccgggcgaggacctggccggcggcggggcctcgggggggccgccggagtggtccgccgagcgcggcgggctgtcctgcctgctggcggccctggccaaccggctgtgcgggccggacacggccgcctgggcgggcaactggaccggcgcccccgacgtgtcggcgctgggcgcgcagggcgtgctgctgctgtccacgcgggacctggccttcgccggggccgtggagtttctggggctgctcgccagcgccggcgaccggcggctcatcgtggtcaacaccgtgcgcgcctgcgactggcccgccgacgggcccgcggtgtcgcggcagcacgcctacctggcgtgcgacctgctgcccgccgtgcagtgcgccgtgcgctggccggcggcgcgggacctgcgccgcacggtgctggccccgggccgcgtgttcggcccgggggtcttcgcgcgcgtggaggccgcgcacgcgcgcctgtaccccgacgcgccgccgctgcgcctgtgccgcggcggcaacgtgcgctaccgcgtgcgcacgcgcttcggcccggacacgccggtgcccatgtccccgcgcgagtaccgccgggccgtgctgccggcgctggacggccgggcggcggcctcggggaccaccgacgccatggcgcccggcgcgccggacttctgcgaggaggaggcccactcgcaccgcgcctgcgcgcgctggggcctgggcgcgccgctgcggcccgtgtacgtggcgctggggcgcgaggcggtgcgcgccggcccggcccggtggcgcgggccgcggagggacttttgcgcccgcgccctgctggagcccgacgacgacgcccccccgctggtgctgcgcggcggcgacgacgacgacgacggcccgggggccctgccgccggcgttgcccgggattcgctgggcctcggccacgggccgcagcggcaccgtgctggcggcggcgggggccgtggaggtgctgggggcggaggcgggcttggccacgcccccgcgacgggaagttgtggactgggaaggcgcctgggacgacgacgacggcggcgcgttcgagggggacggggtgctgtaacgggccgggacggggcggggcgcttgcgaaacccgaagacgcaataaacgacaacgacctgatttagttttgcagtagcgttgtttatttcgaggggcgggagggggcgaggggcgggagggggcgaggggcgggagggggcgaggggcgggagggggcgaggggcgggagggggcgaggggcgggagggggcgaggggcgggagggggcgaggggcgggagggggcgaggggcgggagggggcgaggggcgggagggggcgaggggcgggagggggcgaggggcgggagggggcgaggggcgggagggggcgaggggcgggagggggcgaggggcgggagggggcgaggggcgggagggggcgaggggcgggagggggcgaggggcgggagggggcgaggggcgggagggggcgaggggcggtggtggtgcgcgggcgcccccggagggtttggatctctgacctgagattggcggcactgaggtagagatgcccgaacccccccgagggagcgcgggacgcggccggggagggctggggccggggagggctggggccggggagggctggggccggggagggctggggccggggagggctggggccggggagggctggggccggggagggctggggctggggagggctggggctggggagggctggggcggtggtgtgtgacaggagcggcgtgttgcgctgggggacgtctggaggagcggggggtgcgcggtgacgtgtggatgaggaacaggagttgttgcgcggtgagttgtcgctgtgagttgtgttggtgggcaggtgtggtggatgacgtgacgtgtgacgtgtggatgaggaaccggagtcgccggtgcgccgtgctgttggtgttctgttggtgttgttacacctgtggcagcccgggccccccgcgggcggggcggcgcgcaaaaaaggcgggcggcggtccgggcggcgtgcgcgcgcgcggcgggcgttgggggagcggggggaggagcggggggaggagcggggggaggagcggggggaggagcggggggaggagcggggggaggagcggggggaggagcggggggaggagcggggggaggagcggggggaggagcggggggaggagcggggggaggagcggggggaggagcggggggaggagcggggggaggagcggggggaggagcggggggaggagcggggggaggagcggaaaacgggccccccccgaaacacaccccccgggggtcgcgcgcggccctttaaagcg

SEQ ID NO: 10 - DNA, 159348 bp, Artificial Sequence
  C175 from HSV-C134 Complete Viral  Genome v1 Chimeric HSV expressing EphA2 Endo-MLM
agcccgggccccccgcgggcggggcggcgcgcaaaaaaggcgggcggcggtccgggcggcgtgcgcgcgcgcggcgggcgttggggagcggggggaggagcggggggaggagcggggggaggagcggggggaggagcggggggaggagcggggggaggagcggggggaggagcggggggaggagcggggggaggagcggggggaggagcggggggaggagcggggggaggagcggggggaggagcggggggaggagcggggggaggagcggggggaggagcggggggaggagcggggggaggagcggaaaacgggccccccccgaaacacaccccccgggggtcgcgcgcggccctttaaagcgcggcggcgcagcccgggccccccgcggccgagacgagcgagttagacaggcaagcactactcgcctctgcacgcacatgcttgcctgtcaaactctaccaccccggcacgctctctgtctccatggcccgccgccgccgccatcgcggcccccgccgcccccggccgcccgggcccacgggcgccgtcccaaccgcacagtcccaggtaaccgcctatgggaatgaaagaccccacctgtaggtttggcaagctaggatcaaggtcaggaacagagaaacaggagaatatgggccaaacaggatatctgtggtaagcagttcctgccccgctcagggccaagaacagttggaacaggagaatatgggccaaacaggatatctgtggtaagcagttcctgccccgctcagggccaagaacagatggtccccagatgcggtcccgccctcagcagtttctagagaaccatcagatgtttccagggtgccccaaggacctgaaatgaccctgtgccttatttgaactaaccaatcagttcgcttctcgcttctgttcgcgcgcttctgctccccgagctctatataagcagagctggtttagtgaaccgtcagatcgcctggagacgccatccacgctgttttgacctccatagaagacaccgactctagctagaggatctcctaggaagctggccgcacaaagtggtaccggatcccgggtcgaccatggagctccgggcagtcggtttctgcctggcgctgctgtggggttgcgcgctggcggccgcggcggcacagggaaaggaagttgtccgtttttccaagtcagaacaactaaagcccctgaagacctatgtggatcctcacacttacgaagaccccaaccaggctgtactcaagtttaccaccgagatccacccatcctgtgtggcaaggcagaaggtcattggagcaggagagtttggagaggtctataaagggacgctgaaggcatcctcggggaagaaggagataccggtggccatcaagacactgaaagcgggctacactgagaagcagcgggtggacttcctgagcgaggccagcatcatgggccagtttagccaccacaatatcatccgcctggagggcgtggtctctaaatacaaacccatgatgattatcacagagtacatggagaatggagcgctagacaagttccttagggagaaggatggtgagttcagtgtacttcagttggtgggcatgctgaggggtatcgcatccggcatgaagtacctggccaacatgaactacgtgcaccgggacctggccgcccgcaacatcctcgtcaacagcaacctggtgtgcaaggtgtccgattttggcctgtcgcgtgtgctggaagatgaccccgaggccacctacaccacaagtggcggcaagatccctattcgatggacagccccagaggccatttcctaccgcaagttcacctcagccagcgatgtgtggagctacggcattgtcatgtgggaagtgatgacttatggcgaacggccctactgggaactgtcaaaccacgaggtcatgaaagccatcaacgacggcttccggctccctacgcccatggactgcccttcagccatttaccagctcatgatgcagtgctggcagcaagagcgctcccgccgacccaagtttgccgacatcgttagcatcctggacaagctcatccgagcccccgactccctcaagacgctggctgactttgatccccgagtgtccatccggctgcccagcaccagcggctcggagggagtccccttccgtacggtgtccgagtggctggagagcatcaagatgcaacagtacacggaacacttcatggtggctggctacacggccatcgagaaggtggtacagatgtccaacgaagacatcaaaaggatcggagtgcgtcttcctggccaccagaagcgtattgcctacagcctgctgggactcaaggaccaggtcaacacagtggggattcctatcgggaattcagaacaaaaactcatctcagaagaagatctaggaggcggcgggtcaggtggaggtggctctggcggtggcggttcttgttggacgctggatcgggggtattgctcctaattccgactcactatagggcgaattaattccggagatctctagatccggagagacgatggcaggagccgcgcatatatacgcttggagccagcccgccctcacagggcgggccgcctcgggggcgggactggccaatcggcggccgccagcgcggcggggcccggccaaccagcgtccgccgagtcttcggggcccggcccattgggcgggagttaccgcccaatgggccgggccgcccacttcccggtatggtaattaaaaacttgcaagaggccttgttccgcttcccggtatggtaattagaaactcattaatgggcggccccggccgcccttcccgcttccggcaattcccgcggcccttaatgggcaaccccggtattccccgcctcccgcgccgcgcgtaaccactcccctggggttccgggttatgctaattgcttttttggcggaacacacggcccctcgcgcattggcccgcgggtcgctcaatgaacccgcattggtcccctggggttccgggtatggtaatgagtttcttcgggaaggcgggaagccccggggcaccgacgcaggccaagcccctgttgcgtcggtgggaggggcatgctaatggggttctttgggggacaccgggttggtcccccaaatcgggggccgggccgtgcatgctaatgatattctttgggggcgccgggttggtccccggggacggggccgccccgcggtgggcctgcctcccctgggacgcgcggccattgggggaatcgtcactgccgcccctttggggaggggaaaggcgtggggtataagttagccctggcccgacagtctggtcgcatttgcacctcggcactcggagcgagacgcagcagccaggcagactcgggccgccccctctccgcatcaccacagaagccccgcctacgttgcgacccccagggaccctccgtccgcgaccctccaaccgcatacgacccccatggagccccgccccggagcgagtacccgccggcctgagggccgcccccagcgcgaggtgaggggccgggcgccatgtctggggcgccatattggggggcgccatattggggggcgccatgttgggggacccccgacccttacactggaaccggccgccatgttgggggacccccactcatacacgggagccgggcgccatgttagggggcgtggaaccccgtgacactatatatacagggaccgggggcgccatgttagggggcgcggaaccccctgaccctatatatacagggaccggggtcgccctgttgggggtcgccatgtgaccccctgactttatatatacagaccccccaacacatacacatggcccctttgactcagacgcagggcccggggtcgccgtgggaccccctgactcatacacagagacacgcccccacaacaaacacacagggaccggggtcgccgtgttagggggcgtggtccccactgactcatacgcagggcccccttactcacacgcatctaggggggtggggaggagccgcccgccatatttgggggacgccgtgggacccccgactccggtgcgtctggagggcgggagaagagggaagaagaggggtcgggatccaaaggacggacccagaccacctttggttgcagacccctttctcccccctcttccgaggccagcaggggggcaggactttgtgaggcggggggggggagagggggaactcgtgggcgctgattgacgcgggaaatccccccattcttacccgcccccctttttttccccttagcccgccccggatgtctgggtgtttccctgcgaccgagacctgccggacagcagcgactctgaggcggagaccgaagtgggggggcggggggacgccgaccaccatgacgacgactccgcctccgaggcggacagcacggacacggaactgttcgagacggggctgctggggccgcagggcgtggatgggggggcggtctcgggggggagccccccccgcgaggaagaccccggcagttgcgggggcgccccccctcgagaggacggggggagcgacgagggcgacgtgtgcgccgtgtgcacggatgagatcgcgccccacctgcgctgcgacaccttcccgtgcatgcaccgcttctgcatcccgtgcatgaaaacctggatgcaattgcgcaacacctgcccgctgtgcaacgccaagctggtgtacctgatagtgggcgtgacgcccagcgggtcgttcagcaccatcccgatcgtgaacgacccccagacccgcatggaggccgaggaggccgtcagggcgggcacggccgtggactttatctggacgggcaatcagcggttcgccccgcggtacctgaccctgggggggcacacggtgagggccctgtcgcccacccaccctgagcccaccacggacgaggatgacgacgacctggacgacggtgaggcgggggggcggcgaggaccctgggggaggaggaggaggaggggggagggaggaataggcgggcgggggggcgaggaaagggcgggcgcggaaagggagggcctgggagggggcgtaacctgatcgcgccccccgttgtctcttgcagcagactacgtaccgcccgccccccgccggacgccccgcgcccccccacgcagaggcgccgccgcgccccccgtgacgggcggggcgtctcacgcagccccccagccggccgcggctcggacagcgcccccctcggcgcccatcgggccacacggcagcagtaacaccaacaccaccaccaacagcagcggcggcggcggcggctcccgccagtcgcgagccgcggcgccgcggggggcgtctggcccctccgggggggttggggttggggttggggttgttgaagcggaggcggggcggccgaggggccggacgggcccccttgtcaacagacccgccccccttgcaaacaacagagaccccatagtgatcagcgactcccccccggcctctccccacaggccccccgcggcgcccatgccaggctccgccccccgccccgggcccaccgcgtcctcggccgcgtcgggacccgcgcgcccccgcgcggccgtggccccgtgcgtgcgagcgccgcctccggggcccggcccccgcgccccggcccccgcggacgcgcgccgtgtgccccagtcgcactcgtccctggctcaggccgcgaaccaagaacagagtctgtgccgggcgcgtgcgacggtggcgcgcggctcgggggggccgggcgtggagggtggacacgggccctcccgcggcgccgccccctccggcgcccccccgctcccctccgccgcctctgtcgagcaggaggcggcggtgcgtccgaggaagaggcgcgggtcgggccaggaaaacccctccccccagtccacgcgtccccccctcgcgccggcaggggccaagagggcggcgacgcaccccccctccgactcagggccgggggggcgcggccagggtgggcccgggacccccctgacgtcctcggcggcctccgcctcttcctcctctgcctcttcctcctcggccccgactcccgcgggggccgcctcttccgccgccggggccgcgtcctcctccgcttccgcctcctcgggcggggccgtcggtgccctgggagggagacaagaggaaacctccctcggcccccgcgctgcttctgggccgcgggggccgaggaagtgtgcccggaagacgcgccacgcggagacttccggggccgcccccgcgggcggcctcacgcgctacctgcccatctcgggggtctctagcgtggtcgccctgtcgccttacgtgaacaagacgatcacgggggactgcctgcccatcctggacatggagacggggaacatcggggcgtacgtggtcctggtggaccagacgggaaacatggcgacccggctgcgggccgcggtccccggctggagccgccgcaccctgctccccgagaccgcgggtaaccacgtgatgccccccgagtacccgacggcccccgcgtcggagtggaacagcctctggatgacccccgtggggaacatgctgttcgaccagggcaccctagtgggcgccctggacttccgcagcctgcggtctcggcacccgtggtccggggagcagggggcgtcgacccgggacgagggaaaacaataagggacgccccccgtgtttgtggggaggggggggtcgggcgctgggtggtctctggccgcgcccactacaccagccaatccgtgtcggggaggggaaaagtgaaagacacgggcaccacacaccagcgggtctttagtgttggccctaataaaaaactcaggggatttttgctgtctattgggaaataaaggtttacttttgtatcttttccctgtctgtgttggatggatctcgggggtgcgtgggagtgggggtgcgtgggagtgggggtgcgtgggagtgggggtgcgtgggagtgggggtgcgtgggagtgggggtgcgtgggagtgggggtgcgtgggagtgggggtgcgtgggagtgggggtgcgtgggagtgggggtgccatgttgggcaggctctggtgttaaccacagagccgcggcccgggctgcctgaccaccgatccccgaaagcatcctgccactggcatggagccagaaccacagtgggttgggtgtgggtgttaagtttccgcgagcgcctgcccgcccggactgacctggcctctggccgccacaaagggcgggggggggttaactacactatagggcaacaaaggacgggaggggtggcggggcgggacggggcgcccaaaagggggtcggccacaccacagacgtgggtgttggggggtggggcggaggggtggggggggagacagaaacaggaacatagttagaaaacaagaatgcggtgcagccagagaatcacaggagacgaggggatgggcgtgttggttaccaacccacacccaggcatgctcggtggtatgaaggagggggggcggtgcttcttagagaccgccgggggacgtggggttggtgtgcagaggcacgcgcacccgcgtcggccaggtgggccggtaccccatcccccctcccccgacccttcccacccccgcgtgccagagatcaccccggtcccccggcacccgccactcctccatatcctcgctttaggaacaactttagggggggtacacacgcgccgtgcatttccttccacaccccccctcccccgcactcccccccccccggcagtaagacccaagcatagagagccaggcacaaaaacacaggcggggtgggacacatgccttcttggagtacgtgggtcattggcgtggggggttacagcgacaccggccgaccccctggcggtcttccagccggcccttagataagggggcagttggtggtcggacgggtaagtaacagagtctgactaagggtgggagggggggaaaagaacgggctggtgtgctgtaacacgagcccacccgcgagtggcgtggccgaccttagcctctggggcgccccctgtcgtttgggtcccccccctctattggggagaagcaggtgtctaacctacctggaaacgcggcgtctttgttgaaccacaccggggcgcccttgacgagtgggataacgggggaggaagggagggaggagggtactgggggtgaagaaggggggggggggagaagcgagaacaggaaaggcgacggagcccgacaaaacaccgagaaaaaaaaaccacagcgcatgcgccgggccgttgtggggccccgggccggggccccttgggtccgccggggccccgggccgggccgccacgggggccggccgttggcggtaaccccgattgtttatctcaggccccgggccgggaacccggaaaagcctccggggggcctttttcgcgtcgcgtgccggcgagcgggcccggacggggcccggaccgccgcggtcgggggccccctcgtcccgggccgtacgcggccttcgccccgtgaggggacagacgaacgaaacattccggcgacggaacgaaaaacaccccagacgggttaaagaaacagaaaccgcaaccccccccacccccgaaacggggaaaacaaaaaacagaccagcggccggccggcgcttagggggaggatgtcgccgacgccccttggccgccccggctgcaggggggcccggagagccgcggcacccggacgcgcccggaaagtctttcgcaccacccgcgatcggcacggccgcgcccccgcttttataaaggctcagatgacgcagcaaaaacaggccacagcaccacgtgggtaggtgatgtaattttattttcctcgtctgcggcctaatggatttccgggcgcggtgcccctgtctgcagagcacttaacggattgatatctcgcgggcacgcgcgcccttaatggaccggcgcggggcggggggccggatacccacacgggcgggggggggggtgtcgcgggccgtctgctggcccgcggccacataaacaatgactctgggcctttctgcctctgccgcttgtgtgtgcgcgcgccggctctgcggtgtcggcggcggctgcggcggctgcggcggccgccgtgttcggtctcggtagccggccggcgggtggactcgcggggggccggagggtggaaggcaggggggtgtaggatgggtatcaggacttccacttcccgtccttccatcccccgttcccctcggttgttcctcgcccccccccacaccccgccgctttccgttggggttgttattgttgtcgggatcgtgcgggccgggggtcgccggggcaggggcgggggcgggggtgctcgtcgatcgaccgggctcagtgggggcgtggggtgggggggaaaaggcgaagagactgggggtgggggggggtgtcgggggtggctgtttttttttgtgggtgttttttgtggctgttcccgtcccccgtcacccccctccctccgtccccccgtcgcgggtgtttgtgtttgtttattccgacatcggtttatttaaataaacacagccgttctgcgtgtctgttcttgcgtgtggctgggggcttatatgtggggtcccgggggcgggatggggtttagcggcggggggcggcgcgccggacggggcgctggagataacggcccccggggaacgggggaccggggctgggtctcccgaggtgggtgggtgggcggcggtggccgggccgggccgggccgggtgggcggggtttggaaaaacgaggaggaggaggaggagaaggagggggggggagacggggggaaagcaaggacacggcccggggggtgggagcgcgggccgggccgctcgtaagagccgcgacccggccgccggggagcgttgtcgccgtcggtctgccggcccccgtccctcccttttttgaccaaccagcgcccccccccctcaccaccattcctaccaccaccaccaccaccgacacctcccgcacacccccgcccacactccccccccccacccaacccgcaccacgagcacgggttgggggtagcaggggatcaaaggggggcaaggccggcggggcggttcgggggcgggggcgggagaccgagtaggccccgcccatccgcggcccctcccggcagccacgccccccagcgtcgggtgtcacggggaaagagcagggggagaggggagagggggggagaggggagagggggggagaggggagagggggggagaggggagagggggggagaggggagagggggggagaggggagagggggggagaggggagagggggggagaggggagagggggggagaggggagagggggggagaggggagagggggggagagggggtatataaaccaacgaaaagcgcgggaacggggatacggggcttgtgtggcacgacgtcgtggttgtgttactgggcaaacacttggggactgtaggtttctgtgggtgccgaccctaggcgctatggggattttgggttgggtcgggcttattgccgttggggttttgtgtgtgcgggggggcttgtcttcaaccgaatatgttattcggagtcgggtggctcgagaggtgggggatatattaaaggtgccttgtgtgccgctcccgtctgacgatcttgattggcgttacgagaccccctcggctataaactatgctttgatagacggtatatttttgcgttatcactgtcccggattggacacggtcttgtgggataggcatgcccagaaggcatattgggttaacccctttttatttgtggcgggttttttggaggacttgagtcaccccgcatttcctgccaacacccaggaaacagaaacgcgcttggccctttataaagagatacgccaggcgctggacagtcgcaagcaggccgccagccacacacctgtgaaggctgggtgtgtgaactttgactattcgcgcacccgccgctgtgtagggcgacaggatttgggacctaccaacggaacgtctggacggaccccggttctgccgccggacgatgaagcgggcctgcagccgaagcccctcaccacgccgccgcccatcatcgccacgttggaccccaccccgcgacgggacgccgccgcaaaaagcagacgccgacgaccccactcccggcgcatctaatgatgccgcgacggaaacccgtccgggttcggggggcgaaccggccgcctgtcgctcgtcagggccggcgggcgctcctcgccgccctagaggctgtcccgctggtgtgacgttttcctcgtccgcgccccccgaccctcccatggatttaacaaacgggggggtgtcgcctgtggcgacctcggcgcctctggactggaccacgtttcggcgtgtgtttctgatcgacgacgcgtggcggcccctgttggagcctgagctggcgaaccccttaaccgcccacctcctgaccgaatataatcgtcggtgccagaccgaagaggtgctgccgccgcgggaggatgtgttttcgtggactcgttattgcacccccgacgaggtgcgcgtggttatcatcggccaggacccatatcaccaccccggccaggcgcacggacttgcgtttagcgtgcgcgcgaacgtgccgcctcccccgagtcttcggaatgtcttggcggccgtcaagaactgttatcccgaggcacggatgagcggccacggttgcctggaaaagtgggcgcgggacggcgtcctgttactaaacacgaccctgaccgtcaagcgcggggcggcggcgtcccactctagaatcggttgggaccgcttcgtgggcggagttatccgccggttggccgcgcgccgccccggcctggtgtttatgctctggggcgcacatgcccagaatgccatcaggccggaccctcgggtccattgcgtcctcaagttttcgcacccgtcgcccctctccaaggttccgttcggaacatgccagcatttcctcgtggcgaatcgatatctcgagacccggtcgatttcacccatcgactggtcggtttgaaaggcatcgacgtccggggttttcgtctgtgggggcttttgggtatttccgatgaataaagacggttaatggttaaacctctggtctcatacgggtcggtgatgtcgggcgtcgggggagagggagttccctctgcgcttgcgattctagcctcgtggggctggacgttcgacacgccaaaccacgagtcagggatatcgccagatacgactcccgcagattccattcggggggccgctgtggcctcacctgaccaacctttacacgggggcccggaacgggaggccacagcgccgtctttctccccaacgcgcgcggatgacggcccgccctgtaccgacgggccctacgtgacgtttgataccctgtttatggtgtcgtcgatcgacgaattagggcgtcgccagctcacggacaccatccgcaaggacctgcggttgtcgctggccaagtttagcattgcgtgcaccaagacctcctcgttttcgggaaacgccccgcgccaccacagacgcggggcgttccagcgcggcacgcgggcgccgcgcagcaacaaaagccttcagatgtttgtgttgtgcaaacgcacccacgccgctcgagtgcgagagcagcttcgggtcgttattcagtcccgcaagccgcgcaagtattacacgcgatcttcggacgggcggctctgccccgccgtccccgtgttcgtccacgagttcgtctcgtccgagccaatgcgcctccaccgagataacgtcatgctggcctcgggggccgagtaaccgcccccccgcgccaccctcactgcccgtcgcgcgtgtttgatgttaataaataacgcataaattatcttaatagatctcccgatcccctatggtgcactctcagtacaatctgctctgatgccgcatagttaagccagtatctgctccctgcttgtgtgttggaggtcgctgagtagtgcgcgagcaaaatttaagctacaacaaggcaaggcttgaccgacaattgcatgaagaatctgcttagggttaggcgttttgcgctgcttcgcgatgtacgggccagatatacgcgttgacattgattattgactagttattaatagtaatcaattacggggtcattagttcatagcccatatatggagttccacgttacataacttacggtaaatggcccgcctggctgaccgcccaacgacccccgcccattgacgtcaataatgacgtatgttcccatagtaacgccaatagggactttccattgacgtcaatgggtggagtatttacggtaaactgcccacttggcagtacatcaagtgtatcatatgccaagtacgccccctattgacgtcaatgacggtaaatggcccgcctggcattatgcccagtacatgaccttatgggactttcctacttggcagtacatctacgtattagtcatcgctattaccatggtgatgcggttttggcagtacatcaatgggcgtggatagcggtttgactcacggggatttccaagtctccaccccattgacgtcaatgggagtttgttttggcaccaaaatcaacgggactttccaaaatgtcgtaacaactccgccccattgacgcaaatgggcggtaggcgtgtacggtgggaggtctatataagcagagctctctggctaactagagaacccactgcttactggcttatcgaaattaatacgactcactatagggagacccaagctggctagttaagcttggtaccgagctcggatccactagtccagtgtggtggaattgcccttggatcctcaatggcccagcgcaacggcatgtcgccgcgccccccgcccctcggtcgcggccgcggggccggagggccttcgggggttggttcctctcctccttcttcttgtgtgccgatgggagcgccgtccacagcgggcactggtgcgagtgctgcggctacgacgacgccgggccacggcgtccaccgggtagaaccccgcgggccgccgggcgcccctccgagtagcgacaacaatggcaacttttggcacggcccggagcgcctgttgctgtctcagattccggtggagcgccaggcgctgacggagctggaataccaggccatgggcgccgtgtggcgcgcggcgtttttggccaacagcacgggccgcgccatgcgcaagtggtcgcagcgcgacgcgggcacgctgctgccgctcggacggccgtacggattctacgcgcgggtgacgccgcgcagccagatgaacggcgtgggcgcgacggacctgcgtcaactgtcgccgcgggacgcgtggatcgtactggtggctaccgtggtgcacgaggtggaccccgcagccgacccgacgttgggcgacaaggccggccatcccgagggtctgtgcgcgcaggacggactgtacctggcgctgggcgccgggttccgcgtgttcgtgtacgacctggcaaacaacacgctgatcctagcggcgcgcgacgcggacgagtggtttcggcacggcgcgggcgaggtggtgcggctgtaccgctgcaaccggctgggcgtgggcaccccgcgcgcgacgctgctgcctcagccggcgctccgacagacgttgctgcgcgccgaggaggcgacggcgctcggacgggagctgcgccggcggtgggccggcacgacggtggcgctgcagacgccgggcaggcgactgcagccgatggtactgctgggcgcgtggcaggagctggcgcagtacgagccgttcgcgtcggcgccgcaccccgcgtcgctgctgacggccgtgcgtcggcacctgaaccagcgtctgtgctgcggctggctggcgctgggcgcggtgctgcccgcgcggtggctgggctgcgcggcggggccggcgacggggacggcggcggggacgacgtcgccgccagcggcgagcggcacggagacggaggccgccggcggggacgcgccgtgcgcgatagcgggagccgtggggtccgctgtacctgtgcctccgcagccgtacggcgccgccggcgggggcgcgatttgcgtgcctaacgcggacgcgcacgcggtggtcggggcggacgcggcagcagcagcggcgccgacggtgatggtgggttcgacagcgatggcgggtccggcggcgtcggggaccgtgccgcgcgccatgctggtggtgctgctggacgagctgggcgccgtgttcgggtactgcccgctggacgggcacgtgtacccgctggcggcggagctgtcgcactttctgcgcgcgggcgtgctgggcgcgctggcgctgggacgcgagtcggcgcccgccgccgaggccgcgcggcggctgctgcccgagctggaccgcgagcagtgggagcggccgcgctgggacgcgctgcacctgcacccgcgcgccgcgctgtgggcgcgcgagccgcacgggcagtgggagttcatgtttcgcgaacaacgcggtgaccccataaatgatcccctcgcatttcgtctttcggacgctcgaactctcggtctcgacctcaccaccgtcatgacagagcgtcaaagtcaattgcccgaaaagtatatcggtttctatcagattaggaaacctccttggctcatggaacaacctccacccccatctcgccaaaccaaaccggacgctgcaacgatgcccccaccgctcagtgctcaggcaagcgtcagctacgcgctccgatacgatgacgagtcctggcgcccgctcagcacagttgacgaccacaaagcctggttggatctcgacgaatcacattgggtcctcggggacagccgacccgacgatataaaacaacgcagactgctgaaggccactcaacgacgaggcgccgaaatcgacagacccatgcctgtcgtgcctgaagaatgttacgaccaacgcttcactaccgaaggccaccaggtcatcccgttgtgcgcgtccgaacccgaggatgacgacgaagatcctacctacgacgaattgccgtcgcgcccaccccagaaacataagccgccagacaaacctccgcgcttatgcaaaacgggccccggcccacctccgctgccgccaaagcaacggcacggttccaccgacggaaaagtttctgcgccccgacagtcggagcatcataaaagacagacccgaccgccaaggccgccaccgcccaaattcggggatagaaccgcggcccatctctcgcaaaatatgcgggacatgtacctcgatatgtgtacatcttcgggccacaggccacggccgccagcacctccgcggccgaaaaaatgtcaaacacacgcccctcaccacgttcatcataagcttaagggcaattctgcagatatccagcacagtggcggccgctcgagtctagagggcccgcggttcgaaggtaagcctatccctaaccctctcctcggtctcgattctacgcgtaccggtcatcatcaccatcaccattgagtttaaacccgctgatcagcctcgactgtgccttctagttgccagccatctgttgtttgcccctcccccgtgccttccttgaccctggaaggtgccactcccactgtcctttcctaataaaatgaggaaattgcatcgcattgtctgagtaggtgtcattctattctggggggtggggtggggcaggacagcaagggggaggattgggaagacaatagcaggcatgctggggatgcggtgggctctatggcttctgaggcggaaagaaccagctggggctctagggggtatccccacgcgccctgtagcggcgcattaagcgcggcgggtgtggtggttacgcgcagcgtgaccgctacacttgccagcgccctagcgcccgctcctttcgctttcttcccttcctttctcgccacgttcgccggctttccccgtcaagctctaaatcgggggctccctttagggttccgatttagtgctttacggcacctcgaccccaaaaaacttgattagggtgatggttcacgtagtgggccatcgccctgatagacggtttttcgccctttgacgttggagtccacgttctttaatagtggactcttgttccaaactggaacaacactcaaccctatctcggtctattcttttgatttataagggattttgccgatttcggcctattggttaaaaaatgagctgatttaacaaaaatttaacgcgaattaattctgtggaatgtgtgtcagttagggtgtggaaagtccccaggctccccagcaggcagaagtatgcaaagcatgcatctcaattagtcagcaaccaggtgtggaaagtccccaggctccccagcaggcagaagtatgcaaagcatgcatctcaattagtcagcaaccatagtcccgcccctaactccgcccatcccgcccctaactccgcccagttccgcccattctccgccccatggctgactaattttttttatttatgcagaggccgaggccgcctctgcctctgagctattccagaagtagtgaggaggcttttttggaggcctagtattaaggaatttggctggttgtttgttgtctttaatggaccgcccgcagggggggtggcatttcagtgtcgggtgacgagcgcgatccggccgggatcctaggaccccaaaagtttgtctgcgtattccagggcggggctcagttgaatctcccgcagcacctctaccagcaggtccgcggtgggctggagaaactcggccgtcccggggcaggcggtcgtcgggggtggaggcgcggcgcccaccccgtgtgccgcgcctggcgtctcctctgggggcgacccgtaaatggttgcagtgatgtaaatggtgtccgcggtccagaccacggtcaaaatgccggccgtggcgctccgggcgctttcgccgcgcgaggagctgacccaggagtcgaacggatacgcgtacatatgggcgtcccacccgcgttcgagcttctggttgctgtcccggcctataaagcggtaggcacaaaattcggcgcgacagtcgataatcaccaacagcccaatgggggtgtgttggataacaacgcctccgcgcggcaggcggtcctggcgctcccggccccgtaccatgatcgcgcgggtgccgtactcaaaaacatgcaccacctgcgcggcgtcgggcagtgcgctggtcagcgaggccctggcgtggcataggctatacgcgatggtcgtctgtggattggacatctcgcggtgggtagtgagtcccccgggccgggttcggtggaactgtaaggggacggcgggttaatatacaatgaccacgttcggatcgcgcagagccgatagtatgtgcttactaatgacgtcatcgcgctcgtggcgctcccggagcggatttaagttcatgcgaaggaattcggaggaggtggtgcgggacatggccacgtacgcgctgttgaggcgcaggttgccgggcgtaaagcagatggcgaccttgtccaggctaaggccctgggagcgcgtgatggtcatggcaagcttggagctgatgccgtagtcggcgtttatggccatggccagctccgtagagtcaatggactcgacaaactcgctgatgttggtgttgacgacggacatgaagccgtgttggtcccgcaagaccacgtaaggcaggggggcctcttccagtaactcggccacgttggccgtcgcgtgccgcctccgcagctcgtccgcaaaggcaaacacccgtgcgtacgtgtatcccatgagcgtataattgtccgtctgcagggcgacggacatcagccccccgcgcggcgagccggtcagcatctcgcagccccggaagataacgttgtccacgtacgtgctaaagggggcgccttcaaatgcctccccaaagagctcttggaggattcggaatctcccgaggaaggcccgcttcagcagcgcaaactgggtgtgaacggcggcggtggtctccggttccccgggggtgtagtggcagtaaaacacgtcgagctgttgttcgtccagccccgcgaaaataacgtcgaggtcgtcgtcgggaaaatcgtccgggcccccgtcccgcggccccagttgcttaaaatcaaacgcacgctcgccgggggcgcctgcgtcggccattaccgacgcctgcgtcggcacccccgaagatttggggcgcagagacagaatctccgccgttagttctcccatgcgggcgtaggcgagggtcctctgggtcgcatccaggcccgggcgctgcagaaagttgtaaaaggagataagcccgctaaatatgagccgcgacaggaacctgtaggcaaactccaccgaagtctccccctgagtctttacaaagctgtcgtcacgcaacactgcctcgaaggcccggaacgtcccactaaacccaaaaaccagttttcgcaggcgcgcggttaccgcgatctggctgttgaggacgtaagtgacgtcgttgcgggccacgaccagctgctgtttgctgtgcacctcgcagcgcatgtgccccgcgtcctggtcctggctctgcgagtagttggtgatgcggctggcgttggccgtgagccacttttcaatagtcaggccgggctggtgtgtcagccgtcggtattcgtcaaactccttgaccgacacgaacgtaagcacggggagggtgaacacgacaaactccccctcacgggtcaccttcaggtaggcgtggagcttggccatgtacgcgctcacctctttgtgggaggagaacaaccgcgtccagccggggaggttggcggggttggtgatgtagttttccgggacgacgaagcgatccacgaactgcatgtgctcctcggtgatgggtaggccgtactccagcaccttcatgaggttaccgaactcgtgctcgatgcaccgtttgttgttaataaaaatggcccagctatacgagaggcgggcgtactcccgcagcgtgcggttgcagatgaggtacgtgagcacgttctcgctctggcggacggaacaccgcagtttctggtgctcgaaggtcgactccagggacgccgtctgtgtcggcgagcccacacacaccaacacgggccgcaggcgggccgcgtactggggggtgtggtacagggcgttaatcatccaccagcaatacaccacggccgtgaggaggtgacgcccaaggagcccggcctcgtcgatgacgatcacgttgctgcgggtaaaggccggcagcgccccgtgggtggccggggccaaccgcgtcagggcgccctcggccaaccccagggtccgttccagggcggccagggcgcgaaactcgttccgcgactcctcgcccccggaggcggccagggtgcgcttcgtgaggtccaaaatcacctcccagtagtacgtcagatctcgtcgctgcaggtcctccagcgaggcggggttgctggtcagggtgtacgggtactgccccagttgggcctggacgtgattcccgcgaaacccaaattcatgaaagatggtgttgatgggtcggctgagaaaggcgcccgagagtttggcgtacatgttttgggccgcaatgcgcgtggcgcccgtcaccacacagtccaagacctcgttgattgtctgcacgcacgtgctctttccggagccagcgttgccggtgataagatacaccgcgaacggaaactccctgaggggcaggcctgcgggggactctaaggccgccacgtcccggaaccactgcagacggggcacttgcgctccgtcgagctgttgttgcgagagctctcggatgcgcttaaggattggctgcaccccgtgcatagacgtaaaatttaaaaaggcctcggccctccctggaacggctggtcggtccccgggttgctgaaggtgcggcgggccgggtctctgtccgtctagctggcgctccccgccggccgccgccatgaccgcaccacgctcgcgggcccccactacgcgtgcgcggggggacacggaagcgctgtgctcccccgaggacggctgggtaaaggttcaccccacccccggtacgatgctgttccgcgagattctccacgggcagctggggtataccgagggccagggggtgtacaacgtcgtccggtccagcgaggcgaccacccggcagctgcaggcggcgatctttcacgcgctcctcaacgccaccacttaccgggacctcgaggcggactggctcggccacgtggcggcccgcggtctgcagccccaacggctggttcgccggtacaggaacgcccgggaggcggatatcgccggggtggccgagcgggtgttcgacacgtggcggaacacgcttaggacgacgctgctggactttgcccacgggttggtcgcctgctttgcgccgggcggcccgagcggcccgtcaagcttccccaaatatatcgactggctgacgtgcctggggttggtccccatattacgcaagcgacaagaagggggtgtgacgcagggtctgagggcgtttctcaagcagcacccgctgacccgccagctggccacggtcgcggaggccgcggagcgcgccggccccgggttttttgagctggcgctggccttcgactccacgcgcgtggcggactacgaccgcgtgtatatttactacaaccaccgccggggcgactggctcgtgcgagaccccatcagcgggcagcgcggagaatgtctggtgctgtggcctcccttgtggaccggggaccgtctggtcttcgattcgcccgtacagcggctgtttcccgagatcgtcgcgtgtcactccctccgggaacacgcgcacgtctgccggctgcgcaataccgcgtccgtcaaggtgctgctggggcgcaagagcgacagcgagcgcggggtggccggcgccgcgcgggtcgttaacaaggtgttgggggaggacgacgagaccaaggccgggtcggccgcctcgcgcctcgtgcggcttatcatcaacatgaagggcatgcgccacgtaggcgacattaacgacactgtgcgtgcctacctcgacgaggccggggggcacctgatagacgccccggccgtcgacggtaccctcccgggattcggcaagggcggaaacagccgcgggtctgcgggccaggaccagggggggcgggcgccgcagcttcgccaggccttccgcacggccgtggttaacaacatcaacggcgtgttggagggctatataaataacctgtttggaaccatcgagcgcctgcgcgagaccaacgcgggcctggcgacccagttgcaggagcgcgaccgcgagctccggcgcgcaacatcgggggccctggagcgccagcagcgcgcggccgacctggcggccgagtccgtgaccgggggatgcggcagccgccctgcgggggcggacctgctccgggccgactatgacattatcgacgtcagcaagtccatggacgacgacacgtacgtcgccaacagttttcagcacccgtacatcccttcgtacgcccaggacctggagcgcctgtcgcgcctctgggagcacgagctggtgcgctgtttcaaaattctgtgtcaccgcaacaaccagggccaagagacgtcgatctcgtactccagcggggcgatcgccgcattcgtcgccccctactttgagtcagtgcttcgggccccccgggtaggcgcgcccatcacgggctccgatgtcatcctgggggaggaggagttatgggatgcggtgtttaagaaaacccgcctgcaaacgtacctgacagacatcgcggccctgttcgtcgcggacgtccagcacgcagcgctgcccccgcccccctccccggtcggcgccgatttccggcccggcgcgtccccgcggggccggtccagatcgcggtcgcccggaagaactgcgcgaggcgcgccggaccagggcgggggcatcgggcaccgggatggccgccgcgacggccgacgatgaggggtcggccgccaccatcctcaagcaggccatcgccggggaccgcagcctggtcgaggcggccgaggcgattagccagcagacgctgctccgcctggcctgcgaggtgcgccaggtcggcgaccgccagccgcggtttaccgccaccagcatcgcgcgcgtcgacgtcgcgcctgggtgccggttgcggttcgttctggacgggagtcccgaggacgcctatgtgacgtcggaggattactttaagcgctgctgcggccagtccagttatcgcggcttcgcggtggcggtcctgacggccaacgaggaccacgtgcacagcctggccgtgccccccctcgttctgctgcaccggttctccctgttcaaccccagggacctcctggactttgagcttgcctgtctgctgatgtacctggagaactgcccccgaagccacgccaccccgtcgacctttgccaaggttctggcgtggctcggggtcgcgggtcgccgcacgtccccattcgaacgcgttcgctgccttttcctccgcagttgccactgggtcctaaacacactcatgttcatggtgcacgtaaaaccgttcgacgacgagttcgtcctgccccactggtacatggcccggtacctgctggccaacaacccgccccccgttctctcggccctgttctgtgccaccccgacaagctcctcattccggctgccggggccgcccccccgctccgactgcgtggcctataaccccgccgggatcatggggagctgctgggcgtcggaggaggtgcgcgcgcctctggtctattggtggctttcggagaccccaaaacgacagacgtcgtcgctgttttatcagttttgttgaattttaggaaataaacccggttttgtttctgtggcctcccgacggatgcgcgtgtccttactccgtcttggtgggtgggtggctgtgtatggcgtcccatctgtgcggggaggggggcaagtcggcacgtattcggacagactcaagcacacacgggggagcgctcttgtctcagggcaatgtttttattggtcaaactcaggcaaacagaaacgacatcttgtcgtcaaagggatacacaaacttccccccctcgccccatactcccgccagcaccccggtaaacaccaactcaatctcgcgcaggatttcgcgcaggtgatgagcgcagtccacgggggggagcacaaggggccgcgggtatagatcgacggggacgccgaccgactccccgcctccgggacagacacgcacgacgcgccgccagtagtgctctgcgtccagcaaggcgccgccgcggaaggcagtggggggcaaggggtcgctggcctcaaagggggacacccgaacgctccagtactccgcgtccaaccgtttattaaacgcgtccaagataaggcggtcgcaggcgtcctccataaggccccgggccgtgagtgcgtcctcctccggcacgcctgccgttgtcaggcccaggacccgtcgcagcgtgtcgcgtacgaccccggccgccgtggtgtacgcgggcccgcggagaggaaatcccccaagatggtcagtgttgtcgcgggagttccagaaccacactcccgcctggctccaggcgactgcgtgggtgtagacgccctcgagggccaggcacagtgggtgccgcagccggaggccgttggccctaagcacggctcccacggccgtctcgatggcccgccgggcgtcctcgatcaccccggaagccgcatccgcgtcttgggggtccacgttaaagacaccccagaacgcacccccatcgcccccgcagaccgcgaacttcaccgagctggccgtctcctcgatctgcaggcagacggcggccattaccccacccaggagctgccgcagcgcagggcaggcgttgcacgtgtccgggaccaggcgctccaagacggccccggcccagggctctgagggagcggccaccaccagcgcgtccagtcttgctaggcccgtccggccgtgggggtccgccagcccgctccccccgaggtcggccagggccgccaggagctgggcgcgaagtccggggaagcaaaaccgcgccgtccagacgggcccgacggccgcgggcgggtctaacagttggatgattttagtggcgggatgccaccgcgccaccgcctcccgcactgcgggcaggaggcatccggctgccgccgaggccacgccgggccaggctcgcggggggaggacgaccctgacccccaccgcgggccaggcccccaggagcgcggcgtaagcggccgcggccccgcgcaccaggtcccgtgccgactcggccgtggccggcacggtgaacgtgggccaacccggaaaccccaggacggcaaagtacgggacgggtcccccccggacctcaaactcgggccccagaaaggcaaagacgggggccagggccccgggggcggcgtggaccgtggtatgccactgccggaaaagggcgacgagcgccggcgcggagaacttctcgccggcgcttacaaagtagtcgtaatcgcggggcagcagcacccgtgccgtgactcgttgcgggtgcccgcgtggccgcaggcccacctcgcacacctcgaccaggtccccgaacgcgccctccttcttgatcggcggaaacgcaagagtctggtattcgcgcgcaaatagcgcggttccggtggtgatgttaacggtcagcgaagcggtggacgcgcactggggggtgtcgcgaatggccgccaggcgcgcccacgccagccgcgcgtcgggatgctcggcaacgcgcgccgccagggccatagggtcgatgtcaatgttggcctccgcgaccaggagagcggcgcgaggggcggcgggcgggccccacgacgctctctcaactttcaccaccagtcccgtgcgtgggtccgagccgatacgcagcggggcgaacagggccaccggcccggtctggcgctccagggccgccaggacgcacgcgtacagcgcccgccacagagtcgggttctccaggggctccagcggggaggcggccggcgtcgtcgcggcgcgggcggccgccacgacggcctggacggagacgtccgcggagccgtagaaatcccgcagctccgtcgcggtgacggagacctccgcaaagcgcgcgcgaccctcccctgcggcgttgcgacatacaaaatacaccagggcgtggaagtactcgcgagcgcgggggggcagccataccgcgtaaagggtaatggcgctgacgctctcctccacccacacgatatctgcggtgtccatcgcacggcccctaaggatcacgggcggtctgtgggtcccatgctgccgtgcctggccgggcccggtgggttgcggaaaccggtgacgggggggggggcggtttttggggttggggtgggaaacggcccgggtccgggggccaacttggcccctcggtgcgttccggcaacagcgccgccggtccgcggacgaccacgtaccgaacgagtgcggtcccgagacttatagggtgctaaagttcaccgccccctgcatcatgggccaggcctcggtggggagctccgacagcgccgcctccaggatgatgtcagcgttggggttggcgctggatgagtgcgtgcgcaaacagcgcccccacgcgggcacgcgtagcttgaagcgcgcgcccgcaaactcccgcttgtgggccataagcagggcgtacagctgcctgtgggtccggcaggcgctgtggtcgatgtggtgggcgtccaacaaccccacgattgtctgtttggtgaggtttttaacgcgccccgccccgggaaacgtctgcgtgcttttggccatctgcacgccaaacagttcgccccagattatcttgaacagcgccaccgcgtggtccgtctcactaacggacccgcgcgggggacagccgcttagggcgtcggcgacgcgcttgacggcttcctccgagagcagaagtccgtcggttacgttacagtggcccagttcgaacaccagctgcatgtagcggtcgtagtggggggtcagcaggtccagcacgtcatcggggccgaaggtcctcccagatcccccggccgccgagtcccaatgcaggcgcgcggccatggtgctgcacaggcacaacagctcccagacaggggttacgttcagggtggggggcagggccacgagctccagctctccggtgacgttgatcgtggggatgacgcccgtggcgtagtggtcatagatccgccgaaatatggcgctgctgcgggtggccatgggaacgcggagacaggcctccagcaacgccaggtaaataaaccgcgtgcgtcccatcaggctgttgaggttgcgcatgagcgcgacaatttccgccggcgcgacatcggaccggaggtatttttcgacgaaaagacccacctcctccgtctcggcggcctgggccggcagcgacgcctcgggatcccggcaccgcagctcccgtagatcgcgctgggccctgagggcgtcgaaatgtacgccccgcaaaaacagacagaagtcctttggggtcagggtatcgtcgtgtccccagaagcgcacgcgtatgcagtttagggtcagcagcatgtgaaggatgttaaggctgtccgagagacacgccagcgtgcatctctcaaagtagtgtttgtaacggaatttgttgtagatgcgcgacccccgccccagcgacgtgtcgcatgccgacgcgtcacagcgccccttgaaccggcgacacagcaggtttgtgacctgggagaactgcgcgggccactggccgcaggaactgaccacgtggttcaggagcatgggcgtaaagacgggctccgagcgcgccccggagccgtccatgtaaatcagtagctcccccttgcggagggtgcgcacccgtcccagggactggtacacggacaccatgtccggtccgtagttcatgggtttcacgtaggcgaacatgccatcaaagtgcaggggatcgaagctgaggcccacggttacgaccgtcgtgtatataaccacgcggtattggccccacgtggtcacgtccccgaggggggtgagcgagtgaagcaacagcacgcggtccgtaaactgacggcagaaccgggccacgatctccgcgaaggagaccgtcgacgaaaaaatgcagatgttatcgcccccgccaaggcgcgcttccagctccccaaagaacgtggccccccgggcgtccggagaggcgtccggagacgggccgctcggcggcccgggcgggcgcagggcagcctgcaggagctcggtccccagacgcgggagaaacaggcaccggcgcgccgaaaacccgggcatggcgtactcgccgaccaccacatgcacgtttttttcgccccggagaccgcacaggaagtccaccaactgcgcgttggcggttgcgtccatggcgatgatccgaggacatgtgcgcagcaggcgtagcattaacgcatccacgcggcccagttgctgcatcgttggcgaatagagctggcccagcgtcgacataacctcgtccagaacgaggacgtcgtagttgttcagaaggttggggcccacgcgatgaaggctttccacctggacgataagtcggtggaaggggcggtcgttcataatgtaattggtggatgagaagtaggtgacaaagtcgaccaggcctgactcagcgaaccgcgtcgccagggtctgggtaaaactccgacgacaggagacgacgagcacactcgtgtccggagagtggatcgcttcccgcagccagcggatcagcgcggtagtttttcccgaccccattggcgcgcggaccacagtcacgcacctggccgtcggggcgctcgcgttggggaaggtgacgggtccgtgctgctgccgctcgatcgttgttttcgggtgaacccggggcacccattcggccaaatcccccccgtataacatccgcgctagcgatacgctcgacgtgtactgttcgcactcgtcgtccccaatgggacgcccggcccccagaggatcccccgactccgcgccccccacgaaaggcatgaccggggcgcggacggcgtggtgggtctggtgtgtgcaggtggcgacgtttgtggtctctgcggtctgcgtcacggggctcctcgtcctggcctctgtgttccgggcacggtttccctgcttttacgccacggcgagctcttatgccggggttaactccacggccgaggtgcgcgggggtgtagccgtgcccctcaggttggacacgcagagccttgtgggcacttatgtaatcacggccgtattgttgttggccgcggccgtgtatgccgtggtcggcgccgtgacctcccgctacgaccgcgccctggacgcgggccgccgtctggctgcggcccgcatggccatgccgcacgccacgctgatcgccggaaacgtctgctcttggttgctgcagatcaccgtcctgctgctggcccatcgcatcagccagctggcccacctggtttacgtcctgcactttgcgtgtctggtgtattttgcggcccatttttgcaccaggggggtcctgagcgggacgtatctgcgtcaggtgcacggcctgatggagctggccccgacccatcatcgcgtcgtcggcccggctcgcgccgtgctgacaaacgccttgctgttgggcgtcttcctgtgcacggccgacgccgcggtatccctgaataccatcgccgcgttcaactttaatttttcggccccgggcatgctcatctgcctgaccgtgctgttcgccattctcgtcgtatcgctgttgttggtggtcgagggggtgttgtgtcactacgtgcgcgtgttggtgggcccccacctgggggccgttgccgccacgggcatcgtcggcctggcctgcgagcactattacaccaacggctactacgtggtggagacgcagtggccgggggcacagacgggagtgcgcgtcgccctcgccctggtcgccgcctttgccctcggcatggccgtgctccgctgcacccgcgcctatctgtatcacaggcggcaccacaccaaattttttatgcgcatgcgcgacacgcgacaccgcgcacattccgccctcaagcgcgtacgcagttccatgcgcggatcgcgagacggccgccacaggcccgcgcccggcagcccgcccgggattcccgaatatgcggaagacccctacgcgatctcatacggcggccagctcgaccggtacggagattccgacggggagccgatttacgacgaggtggcggacgaccaaaccgacgtattgtacgccaagatacaacacccgcggcacctgcccgacgacgagcccatctatgacaccgttggggggtacgaccccgagcccgccgaggaccccgtgtacagcaccgtccgccgttggtagctgtttggttccgttttaataaaccgtttgtgtttaacccgaccgtggtgtatgtctggtgtgtggcgtccgatcccgttactatcaccgtccccccccctcaaccccggcgattgtgggttttttaaaaacgacacgcgtgcgaccgtatacagaacattattttggtttttattcgctatcggacatggggggtggaaactgggtggcggggcaggcgcctccgggggtccgccggtgagtgtggcgcgagggggggtccgacgaacgcaggcgcggtctccccggggcccgcgtaaccacgcgcatatccgggggcacgtagaaattaccttcctcttcggactcgatatccacgacgtcaaagtcgtgggcggtcagcgagacgacctccccgtcgtcggtgatgaggacgttgtttcggcagcagcagggccgggccccggagaacgagaggcccatagctcggcgagcgtgtcgtcgaacgccaggcggctgcttcgctggatggccttatagatctccggatcgatgcggacgggggtaatgatcagggcgatcggaacggcctggttcgggagaatggacgccttgctgggtcctgcggccccgagagccccggcgccgtcctccaggcggaacgttacgccctcctccgcgctggtgcggtgcctgccgataaacgtcaccagatgcgggtggggggggcagtcggggaagtggctgtcgagcacgtagccctgcaccaagatctgcttaaagttcgggtggcgggggttcgcgaagacgggctcgcggcggaccagatccccggagctccaggacacgggggagatggtgtggcgtccgaggtcgggggcgccaaacagaagcacctccgagacaacgccgctatttaactccaccaaggcccgatccgcggcggagcaccgccttttttcgcccgaggcgtgggcctctgaccaggcctggtcttgcgtgacgagagcctcctccgggccggggacgcgcccgggcgcgaagtatcgcacgctgggcttcgggatcgaccggataaatgcccggaacgcctccggggaccggtgtgccatcaagtcctcgtacgcggaggccgtggggtcgctggggtccatggggtcgaaagcgtacttggcccggcatttgacctcgtaaaaggccaggggggtcttggggactggggccaggtagccgtgaatgtcccgaggacagacgagaatatccagggacgccccgaccatccccgtgtgaccgtccatgaggaccccacacgtatgcacgttctcttcggcgaggtcgctgggttcgtggaagataaagcgccgcgtgtcggcgccggcctcgccgccgtcgtccgcgcggcccacgcagtagcgaaacagcaggcttcgggccgtcggctcgttcacccgcccgaacatcaccgccgaagactgtacatccggtcgcaggctggcgttgtgcttcagccactggggcgagaaacacggaccctgggggccccagcggagggtggatgcggtcgtgaggccccgccggagcagggcccatagctggcagtcggcctggttttgcgtggccgcctcgtaaaaccccatgaggggccggggcgccacggcgtccgcggcggccgggggggcgcggcgcgtcaggcgccataggtgccggccgagtccgcggtccaccatacccgcctcctcgaggaccacggccagggaacacagataatccaggcgggcccagaggggaccgatggccagaggggcgcggacgccgcgcagcaacccgcgcaggtggcgctcgaacgtctcggctagtatatgggagggcagcgcgttggggatcaccgacgccgaccacatagagtcaaggtccggggagtcgggatcggcgtccgggtcgcgggcgtgggtgcccccaggagatagcggaatgtccggggtcggaggcccggaggcgtcagaaagtgccggcgacgcggcccggggcttttcgtctgcggtgtcggtggcgtgctgatcacgtggggggttatcgggcgaatgggagctcgggtccacagctgacgtcgtctggggtggggggggcaggggacggaaggtggttgtcagcggaagactgttagggcgggggcgcttgggggggctgtcggggccacgaggggtgtcctcggccagggcccagggacgcttagtcacggtgcgtcccggcggacatgctgggcctaccgtggactccatttccgagacgacgtggggggagcggtggttgagcgcgccgccgggtgaacgctgattctcacgacagcgcgtgccgcgcgcacgggttggtgtgacacaggcgggacaccagcaccaggagaggcttaagctcgggaggcagcgccaccgacgacagtatcgccttgtgtgtgtgctggtaatttatacaccgatccgtaaacgcgcgccgaatcttgggattgcggaggtggcgccggatgccctctgggacgtcatacgccaggccgtgggtgttggtctcggccgagttgacaaacagggctgggtgcagcacgcagcgataggcgagcagggccagggcgaagtccggcgacagctggttgttgaaatactggtaaccgggaaaccgggtcacgggtacgcccaggctcggggcgacgtacacgctaaccaccaactccagcagcgtctggcccagggcgtacaggtcaaccgctagcccgacgtcgtgcttcaggcggtggttggtaaattcggcccgttcgttgttaaggtatttcaccaacagctccgggggctggttatacccgtgacccaccagggtgtgaaagttggctgtggttagggcggtgggcatgccaaacatccggggggacttgaggtccggctcctggaggcaaaactgcccccgggcgatcgtggagttggagttgagggtgacgaggctaaagtcggcgaggacggcccgccggagcgagacggcgtccgaccgcagcatgacgaggatgttggcgcacttgatatccaggtggctgatcccgcaggtggtgtttaaaaacacaacggcacgggccagctccgtgaagcactggtggagggccgtcgagaccgaggggtttgttgtgcgcagggacgccagttggccgatatacttaccgaggtccatgtcgtacgcggggaacactatctgtcgttgttgcagcgagaacccgaggggcgcgatgaagccgcggatgttgtgggtgcggccggcgcgtagagcgcactccccgaccaacagggtcgcgatgagctcaacggcaaaccactccttttcctttatggtcttaacggcaagcttatgttcgcgaatcagttggacttcgccgtatcccccagaccccccgaagcttcgggccccggggatctcgagggtcgtgtagtgtagggcggggttgatggcgaacacggggctgcatagcttgcggatgcgcgtgagggtgaggatgtgcgagggggacgaggggggtgcggttaacgccgcctgggatctgcgcaggggcgggcggttcagtttggccgccgtaccgggcgcctcgggggacgcgcggcgatgagacgagcggctcattcgccatcgggatagtcccgcgcgaagccgctcgcggaggccggatcggtggcggcacccgtgggaggagcgggagacggcggcgttctggagagaggggccgctggggcgcccggaggccccatgggggttggagtgtatgtaggatgcgagccaatccttgaaggaccgttggcgtgcaccttgggggctgaggttagctgccacatgaccagcaggtcgctgtctgcgggactcatccatccttcggccaggtcgccgtctccccacagagaagcgttggtcgctgcctcctcgagttgctcctcctggtccgcaagacgatcgtccacggcgtccaggcgctcaccaagcgccggatcgaggtaccgtcggtgtgcggttagaaagtcacgacgcgccgcttgctcctccacgcgaattttaacacaggtcgcgcgctgtcgcatcatctctaagcgcgcgcgggactttagccgcgcctccaattccaagtgggccgcctttgcagccataaaggcgccaacaaaccgaggatcttgggtgctgacgccctcccggtgcagctgcagggtctggtccttgtaaatctcggctcggaggtgcgtctcggccaggcgtcggcgcagggccgcgtgggcggcatctcggtccattccgccaccctgcgggcgacccgggggtgctctgatagtctcgcgtgcccaaggcccgtgatcggggtacttcgccgccgcgacccgccacccggtgtgcgcgatgtttggtcagcagctggcgtccgacgtccagcagtacctggagcgcctcgagaaacagaggcaacttaaggtgggcgcggacgaggcgtcggcgggcctcacaatgggcggcgatgccctacgagtgccctttttagatttcgcgaccgcgacccccaagcgccaccagaccgtggtcccgggcgtcgggacgctccacgactgctgcgagcactcgccgctcttctcggccgtggcgcggcggctgctgtttaatagcctggtgccggcgcaactaaaggggcgtgatttcgggggcgaccacacggccaagctggaattcctggcccccgagttggtacgggcggtggcgcgactgcggtttaaggagtgcgcgccggcggacgtggtgcctcagcgtaacgcctactatagcgttctgaacacgtttcaggccctccaccgctccgaagcctttcgccagctggtgcactttgtgcgggactttgcccagctgcttaaaacctccttccgggcctccagcctcacggagaccacgggcccccccaaaaaacgggccaaggtggacgtggccacccacggccggacgtacggcacgctggagctgttccaaaaaatgatccttatgcacgccacctactttctggccgccgtgctcctcggggaccacgcggagcaggtcaacacgttcctgcgtctcgtgtttgagatccccctgtttagcgacgcggccgtgcgccacttccgccagcgcgccaccgtgtttctcgtcccccggcgccacggcaagacctggtttctggtgcccctcatcgcgctgtcgctggcctcctttcgggggatcaagatcggctacacggcgcacatccgcaaggcgaccgagccggtgtttgaggagatcgacgcctgcctgcggggctggttcggttcggcccgagtggaccacgttaaaggggaaaccatctccttctcgtttccggacgggtcgcgcagtaccatcgtgtttgcctccagccacaacacaaacgtaagtcctcttttctttcgcatggctctcccaaggggccccgggtcgacccgacccacacccacccacccacatacacacacaaccagacgcgggaggaaagtctgccccgtgggcactgatttttattcgggatcgcttgaggaggcccgggcaacggcccgggcaacggtggggcaactcgtagcaaataggcgactgatgtacgaagagaagacacacaggcgccacccggcgctggtcggggggatgttgtccgcgccgcaccgtcccccgacgacctcttgcagacggtccgtgatgcaaggacggcggggggcctgcagcagggtgaccgtatccacgggatggccaaagagaagcggacacaggctagcatccccctggaccgccagggtacactgggccatcttggcccacagacacggggcgacgcagggacaggactccgttacgacggaggagagccacagtgcgttggcggaatcgatgtggggcggcggggcgcaggactcgcagccccccgggtggttagtgatcctggccaggagccatcccagatggcgggccctgcttcccggtggacagagcgaccccaggtcgctgtccatggcccagcagtagatctggccgctggggaggtgccaccaggcccccgggcccaaggcgcagcacgcgcccggctccgggggggtcttcgcggggaccagatacgcgccatccagctcgccgaccactggctcctccgcgagctgttcggtggttgggtcgggggtttcctccgggggggtggccgcccgtatgcgggcgaacgtgagggtgcacaggagcggggtcagggggtgcgtcacgctccggaggtggacgatcgcgcagtagcggcgctcgcggttaaagaaaaagagggcaaagaaggtgttcgggggcaaccgcagcgccttggggcgcgtcagatacagaaaaatctcgcagaagagggcgcgcccggggtctgggttaggaagggccacctgacacagaggctcggtgaggaccgttagacaccgaaagatcttgagccgctcgtccgcccgaacgacgcgccacacaaagacggagttgacaatgcgcgcgatagagtcgacgtccgtccccaggtcgtcgactctgtcgcgcgtgccgcgagctccggcccgggaatccggccggggcaaggtccccgggggaccaggcggcgccaggggccgccggggtcccagctgcgccatgccgggggcggggggagggcaaaccccagaggcgggggccaacggcgcggggaggagtggatgggcgaggtggccgggggaaggcgcccgctagcgagaacggccgttcccggacgacaccttgcgacaaaacctaaggacagcggcccgcgcgacggggtccgagaggctaaggtaggccgcgatgttaatggtgaacgcaaagccgccgggaaagacaactatgccacagaggcggcgattaaaccccaggcagaggtaggcgtagctttccccgggcaggtattgctcgcagaccctgcgtggggctgtggaggggacggcctccatgaagcgacatttactctgctcgcgtttactgacgtcaccatccatcgccacggcgattggacgattgttaagccgcagcgtgtctccgcttgtgctgtagtagtcaaaaacgtaatggccgtcggagtcggcaaagcgggccgggaggtcgtcgccgagcgggacgacccgccgcccccgaccgccccgtccccccaggtgtgccaggacggccagggcatacgcggtgtgaaaaaaggcgtcgggggcggtcccctcgacggcgcgcatcaggttctcgaggagaatggggaagcgcctggtcacctcccccagccacgcgcgttggtcggggccaaagtcatagcgcaggcgctgtgagattcgcgggccgccctgaagcgcggcccggatggcctggcccagggcccggaggcacgccagatgtatgcgcgcggtaaaggcgacctcggcggcgatgtcaaagggcggcaggacggggcgcgggtggcgcaggggcacctcgagcgcgggaaagcggagcagcagctccgcctgcccagcgggagacagctggtgggggcgcacgacgcgttctgcggcgcaggcctcggtcagggccgtggccagcgccgaggacagcagcggagggcgggcgcgtcgcccgccccacgccactgagttctcgtaggagacgacgacgaagcgctgcttggttccgtagtggtggcgcaggaccacggagatagaacgacggctccacagccagtccggccggtcgccgccggccagggcttcccatccgcgatccaaccactcgaccagcgaccgcggctttgtggtaccaggggtaagggttagaacgtcgttcaggatgtcctcgcccccgggcccgtggggcgctggggccacaaagcggcccccgccggggggctccagacccgccagcaccgcatctgcgtcagccgcccccatggcgcccccgctgacggcctggtgaaccagggcgccctggcggagccccgatgcaacgccacaggccgcacgcccggtccgagcgcggaccgggtggcggcgggtgacgtcctgcactgcccgctgaaccaacgcgaggatctcctcgttctcctgtgcgatggacacgtcctgggccgcggtcgtgtcgccgccgggggccgtcagctgctcctccggggagatgggggggtcggacgccccgacgatgggcgggtctgcgggcgcccccgcgtggggccgggccaagggctgcggacgcggggacgcgctttcccccagacccatggacaggtgggccgcggcctccttcgcggccggcggggcggcggcgccaagcagagcgacgtagcggcacaaatgccgacagacgcgcatgatgcgcgtgctgtcggccgcgtagcgcgtgttgggggggacgagctcgtcgtaactaaacagaatcacgcgggcacagctcgcccccgagccccacgcgaggcgcagcgccgccacggcgtacgggtcatagacgccctgcgcgtcacacaccacgggcagggagacgaacaaccccccggcgctggacgcacgcggaaggaggccagggtgtgccggcacgacgggggccagaagctcccccaccgcatccgcgggcacgtaggcggcaaacgccgtgcaccacggggtacagtcgccggtggcatgagcccgagtctggatttcgacctggaagtttgcggccgtcccgagtccggggcggccgcgcatcagggcggccagagggattcccgcggccgccaggcactcgctggatatgatgacgtgaaccaaagacgagggccgacccgggccgtggccgagatcgtactggacctcgttggccaagtgcgcgttcatggttcggggtgggtgtgggtgtgtaggcgatgcgggtcccccgagtccgcgggaagggcgtgggtttggcgcgcgtatgcgtattcgccaacggaggcgtgcgtgcttatgcgcggcgcgtttcttctgtctccagggaatccgaggccaggactttaacctgctctttgtcgacgaggccaactttattcgcccggatgcggtccagacgattatgggctttctcaaccaggccaactgcaagattatcttcgtgtcgtccaccaacaccgggaaggccagtacgagctttttgtacaacctccgcggggccgccgacgagcttctcaacgtggtgacctatatatgcgatgatcacatgccgagggtggtgacgcacacaaacgccacggcctgttcttgttatatcctcaacaagcccgttttcatcacgatggacggggcggttcgccggaccgccgatttgtttctggccgattccttcatgcaggagatcatcgggggccaggccagggagaccggcgacgaccggcccgttctgaccaagtctgcgggggagcggtttctgttgtaccgcccctcgaccaccaccaacagcggcctcatggcccccgatttgtacgtgtacgtggatcccgcgttcacggccaacacccgagcctccgggaccggcgtcgctgtcgtcgggcggtaccgcgacgattatatcatctttgccctggagcacttttttctccgcgcgctcacgggctcggcccccgccgacatcgcccgctgcgtcgtccacagtctgacgcaggtcctggccttgcatcccggggcgtttcgcggcgtccgggtggcggtcgagggaaatagcagccaggactcggccgtcgccatcgccacgcacgtgcacacagagatgcaccgcctactggcctcggagggggccgacgcgggctcgggccccgagcttctcttctaccactgcgagcctcccgggagcgcggtgctgtacccctttttcctgctcaacaaacagaagacgcccgcctttgaacactttattaaaaagtttaactccgggggcgtcatggcctcccaggagatcgtttccgcgacggtgcgcctgcagaccgacccggtcgagtatctgctcgagcagctgaataacctcaccgaaaccgtctcccccaacactgacgtccgtacgtattccggaaaacggaacggcgcctcggatgaccttatggtcgccgtcattatggccatctaccttgcggcccaggccggacctccgcacacattcgctcccatcacacgcgtttcgtgagcgcccaataaacacacccaggtatgctacgcacgaccacggtgtcgcctgttaaggggggggaagggggtgttggcgggaagcgtgggaacacgggggattctctcacgaccggcaccagtaccacccccctgtgaacacagaaacccaacccaaatcccataaacatacgacacacaggcatattttggaatttcttgggtttttatttatttaggtatgctggggtttctccctggatgcccaccccccacccccccccgtgggtctagccgggccttagggatagcgtataacgggggccatgtctccggaccgcacaacggccgcgccgtcaaaggtgcacacccgaaccacgggagccagggccaaggtgtctcctagttggcccgcgtgggtcagccaggcgacgagcgcctcgtaaagcggcagccttcgctctccatcctgcaccagggccggggcttcggggtgaatgagctgggcggcctcccgcgtgacactctgcatctgcaggagagcgttcacgtacccgtcctgggcacttagcgcaaagagccgggggattagcgtaaggatgatggtggttccctccgtgatcgagtaaaccatgttaaggaccagcgatcgcagctcggcgtttacgggaccgagttgttggacgtccgccagcagcgagaggcgactcccgttgtagtacagcacgttgaggtctggcagccctccggggtttctggggctggggttcaggtcccggatgcccctggccacgagccgcgccacgatttcgcgcgccaggggcgatggaagcggaacgggaaaccgcaacgtgaggtccagcgaatccaggcgcacgtccgtcgcttggccctcgaacacgggcgggacgaggctgatggggtccccgttacagagatctacgggggaggtgttgcgaaggttaacggtgccggcgtgggtgaggcccacgtccaggggacaggcgacgattcgcgtgggaagcacccgggtgatgaccgcggggaagcgccttcggtacgccagcaacaaccccaacgtgtcgggactgacgcctccggagacgaaggattcgtgcgccacgtcggccagcgtcagttgccggcggatggtcggcaggaataccacccgcccttcgcagcgctgcagcgccgccgcatcggggcgcgagatgcccgagggtatcgcgatgtcagtttcaaagccgtccgccagcatggcgccgatccacgcggcagggagtgcagtggtggttcgggtggcgggaggagcgcggtgggggtcagcggcgtagcagagacgggcgaccaacctcgcataggacggggggtgggtcttagggggttgggaggcgacagggaccccagagcatgcgcggggaggtctgtcgggcccagacgcaccgagagcgaatccgtccacggagtcccggtctgggttttatggggcccggccctcggaatcgcggcttgtcggcggggacaaagggggcggggctagggggcttgcggaaacagaagacgcgtgggataaaagaatcgcactaccccaaggaagggcggggcggtttattacagagccagtcccttgagcggggatgcgtcatagacgagatactgcgcgaagtgggtctcccgcgcgtgggcttccccgttgcgggcgctgcggaggagggcggggtcgctggcgcaggtgagcgggtaggcctcctgaaacaggccacacgggtcctccacgagttcgcggcaccccggggggcgcttaaactgtacgtcgctggcggcggtggccgtggacaccgccgaacccgtctccacgatcaggcgctccaggcagcgatgtttggcggcgatgtcggccgacgtaaagaacttaaagcaggggctgagcaccggcgaggccccgttgaggtggtaggccccgttatagagcaggtccccgtacgaaaatcgctgcgacgcccacgggttggccgtggccgcaaaggcccgggacgggtcgctctggccgtggtcgtacatgagggcggtgacatccccctccttgtcccccgcgtaaacgcccccggcggcgcgtccccgggggttgcagggccggcggaagtagttgacgtcggtcgacacgggggtggcgataaactcacacacggcgtcctggccgtggtccatccctgcgcgccgcggcacctgggcgcacccgaacacggggacgggctgggccggccccaggcggtttcccgccacgaccgcgttccgcaggtacacggctgccgcgttgtccaggagagggggagccccgcggcccaggtaaaagttttggggaaggttgcccatgtcggtgacggggttgcggacggttgccgtggccacgacggcggtgtagcccacgcccaggtccacgttcccgcgcggctgggtgagcgtgaagtttacccccccgccagtttcgtgccgggccacctggagctggcccaggaagtacgcctccgacgcgcgctccgagaacagcatgttctcagtcacaaagcggtcctgtcggacgacggtgaacccaaacccgggatggaggcccgtcttgagctgatgatgcaaggccacgggactgatcttgaagtaccccgccatgagcgcgtaggtcagcgcgttctccccggccgcgctctcgcggacgtgctgcacgacgggctgtcggatcgacgaaaagtagttggcccccagagccggggggaccagggggacctgccgcgacaggtcgcgcagggccggggggaaattgggcgcgttcgccacgtggtcggccccggcgaacagcgcgttgacgggaagggggtaaaaatagtcgccattttggatggtatggtccagatgctggggggccatcagcaggattccggcgtgcaacgccccgtcgaatatgcgcatgttggtggtggacgcggtgttggcgcccgcgtcgggcgccgccgagcagagcagcgccgttgtgcgttcggccatgttgtgggccagcacctgcagcgtgagcatggcgggcccgtccactaccacgcgcccgttgtgaaacatggcgttgaccgtgttggccaccagattggccgggtgcagggggtgcgcggggtccgtcacggggtcgctggggcactcctcgccgggggcgatctccgggaccaccatgttctgcagggtggcgtatacgcggtcgaagcgaacccccgcggtgcagcagcggccccgcgagaaggcgggcaccatcacgtagtagtaaatcttgtggtgcacggtccagtccgccccccggtgcggccggtcatccgcggcgtccgcggctcgggcctgggtgttgtgcagcagctggccgtcgttgcggttgaagtccgcggtcgccacgttacatgccgccgcgtacacggggtcgtggccccccgcgctaacccggcagtcgcgatggcggtccagggccgcgcgccgcatcagggcgtcacagtcccacacgaggggtggcagcagcgccgggtctcgcattaggtgattcagctcggcttgcgcctgcccgcccagctccgggccggtcagggtaaagtcatcaaccagctgggccagggcctcgacgtgcgccaccaggtcccggtacacggccatgcactcctcgggaaggtctcccccgaggtaggtcacgacgtacgagaccagcgagtagtcgttcacgaacgccgcgcaccgcgtgttgttccagtagctggtgatgcactggacaacgagccgggccagggcgcagaagacgtgctcgctgccgtgtatggcggcctgcagcaggtaaaacaccgccgggtagttgcggtcgtcgaacgccccgcgaacggcggcgatggtggcgggggccatggcgtggcgtcccacccccagctccaggccccgggcgtcccggaacgccgccggacatagcgccaggggcaagttgccgttcaccacgcgccaggtggcctggatctcccccgggccggccgggggaacgtccccccccggcagctccacgtcggccacccccacgaagaagtcgaacgcggggtgcagctcaagagccaggttggcgttgtcgggctgcataaactgctccggggtcatctggccttccgcgacccatcggacccgcccgtgggccaggcgctgcccccaggcgttcaaaaacagctgctgcatgtctgcggcggggccggccggggccgccacgtacgccccgtacggattggcggcttcgacggggtcgcggttaaggcccccgaccgccgcgtcaacgttcatcagcgaagggtggcacacggtcccgatcgcgtgttccagagacaggcgcagcacctggcggtccttcccccaaaaaaacagctggcggggcgggaaggcgcggggatccgggtggccgggggcggggactaggtccccggcgtgcgcggcaaaccgttccatgaccggattgaacaggcccaggggcaggacgaacgtcaggtccatggcgcccaccagggggtagggaacgttggtggcggcgtagatgcgcttctccagggcctccagaaagaccagcttctcgccgatggacaccagatccgcgcgcacgcgcgtcgtctggggggcgctctcgagctcgtccagcgtctgccggttcaggtcgagctgctcctcctgcatctccagcaggtggcggcccacgtcgtccagacttcgcacggccttgcccatcacgagcgccgtgaccaggttggccccgttcaggaccatctcgccgtacgtcaccggcacgtcggcttcggtgtcctccactttcaggaaggactgcaggaggcgctgtttgatcggggctgtggtgactagcaccccgtcgaccggccgcccgcgcgtgtcggcatgcgtcagacggggcacggccacggagggctgcgtggccgtggtgaggtccacgagccaggcctcgacggcctcccggcggtggcccgccttgcccaggaaaaagctcgtctcgcagaagcttcgctttagctcggcgaccagggtcgcccgggccaccctggtggccaggcggccgttgtccaggtatcgttgcatcggcaacaacaaagccaggggcggcgccttttccagcagcacgtgcagcatctggtcggccgtgccgcgctcaaacgccccgaggacggcctggacgttgcgagcgagctgttggatggcgcgcaactggcgatgcgcgctgatacccgtcccgtccagggcctcccccgtgagcagggcgatggcctcggtggccaggctgaaggcggcgttcagggcccggcggtcgataatcttggtcatgtaattgtgtgtgggttgctcgatggggtgcgggccgtcgcgggcaatcagcggctggtggacctcgaactgtacgcgcccctcgttcatgtaggccagctccggaaacttggtacacacgcacgccaccgacaacccgagctccagaaagcgcacgagcgacagggtgttgcaatacgaccccagcagggcgtcgaactcgacgtcgtacaggctgtttgcatcggagcgcacgcgggaaaaaaaatcgaacaggcgtcgatgcgacgccacctcgatcgtgctaaggagggacccggtcggcaccatggccgcggcataccggtatcccggagggtcgcggttgggagcggccatggggtcgcgtggagatcggctgtctctagcgatattggcccggggaggctaagatccaccccaacgcccggccacccgtgtacgtgcccgacggcccaaggtccaccgaaagacacgacggacccggacccaaagaggcgggggatgctgtgtgagaggccgggtgtcggtcgggggggaaaggcaccgggagaaggctgcggcctcgttccaggagaacccagtgtccccaacagacccggggacgtgggatccccggccttatatacccccccccgccccacccccgttagaacgcgacgggtgcattcaagatggccctggtccaaaagcgtgccaggaagaaattggcagaggcggcaaagctgtccgccgccgccacccacatcgaggccccggccgcacaggctatccccagggcccgtgtgcgcaggggatcggtgggtggcagcatttggttggtggcgataaagtggaaaagcccgtccggactgaaggtctcgtgggcggcggcgaacaaggcacacagggccgtgcctcccaaaaacacggacatcccccaaaacacgggcgccgacaacggcagacgatccctcttgatgttaacgtacaggaggagcgcccgcaccgcccacgtaacgtagtagccgacgatggcggccaggatacaggccggcgccaccacccttccggtcagcccgtaatacatgcccgctgccaccatctccaacggcttcaggaccaaaaacgaccaaaggaacagaatcacgcgctttgaaaagaccggctgggtatggggcggaagacgcgagtatgccgaactgacaaaaaaatcagaggtgccgtacgaggacaatgaaaactgttcctccagcggcagttctccctcctcccccccgaaggcggcctcgtcgaccagatctcgatccaccagaggaaggtcatcccgcatggtcatggggtgtgcggtggaggtggggagaccgaaaccgcaaagggtcgcttacgtcagcaggatcccgagatcaaagacacccgggttcttgcacaaacaccacccgggttgcatccgcggaggcgagtgttttgataaggccgttccgcgccttgatataacctttgatgttgaccacaaaacccggaatttacgcctacgccccaatgcccacgcaagatgaggtaggtaacccccccgtgggtgtgacgttgcgtttagttcattggaggccaaggggaaaaatggggtggggaggaaacggaaaacccagtaggccgtgtcgggaacacgcccggggttgtcctcaaaaggcagggtccatactacggaagccgtcgttgtattcgagacctgcctgtgcgacgcacgtcggggttgcctgtgtccggttcggcccccaccgcgtgcggcacgcacgaggacgagtccgcgtgctttattggcgttccaagcgttgccctccagtttctgttgtcggtgttcccccatacccacgcccacatccaccgtagggggcctctgggccgtgttacgtcgccgcccgcgatggagcttagctacgccaccaccatgcactaccgggacgttgtgttttacgtcacaacggaccgaaaccgggcctactttgtgtgcggggggtgtgtttattccgtggggcggccgtgtgcctcgcagcccggggagattgccaagtttggtctggtcgttcgagggacaggcccagacgaccgcgtggtcgccaactatgtacgaagcgaactccgacaacgcggcctgcaggacgtgcgtcccattggggaggacgaggtgtttctggacagcgtgtgtcttctaaacccgaacgtgagctccgagctggatgtgattaacacgaacgacgtggaagtgctggacgaatgtctggccgagtactgcacctcgctgcgaaccagcccgggtgtgctaatatccgggctgcgcgtgcgggcgcaagacagaatcatcgagttgtttgaacacccaacgatagtcaacgtttcctcgcactttgtgtataccccgtccccatacgtgttcgccctggcccaggcgcacctcccccggctcccgagctcgctggaggccctggtgagcggcctgtttgacggcatccccgccccacgccagccacttgacgcccacaacccgcgcacggatgtggttatcacgggccgccgcgccccacgacccatcgccgggtcgggggcggggtcggggggcgcgggcgccaagcgggccaccgtcagcgagttcgtgcaagtcaaacacattgaccgcgtgggccccgctggcgtttcgccggcgcctccgccaaacaacaccgactcgagttccctggtgcccggggcccaggattccgccccgcccggccccacgctaagggagctgtggtgggtgttttatgccgcagaccgggcgctggaggagccccgcgccgactctggcctcacccgcgaggaggtacgtgccgtacgtgggttccgggagcaggcgtggaaactgtttggctccgcgggggccccgcgggcgtttatcggggccgcgttgggcctgagccccctccaaaagctggccgtttactactatatcatccaccgagagaggcgcctgtcccccttccccgcgctagtccggctcgtaggccggtacacacagcgccacggcctgtacgtccctcggcccgacgacccagtcttggccgatgccatcaacgggctggttcgcgacgcgctggcggccggaaccacagccgagcagctcctcatgttcgaccttctccccccaaaggacgtgccggtgggaagcgacgtgcaggccgacagcaccgctctgctgcgctttatagaatcgcaacgtctcgccgtccccgggggggtgatctcccccgagcacgtcgcgtaccttggtgcgttcctgagcgtgctgtacgctggccgcgggcgcatgtccgcagcaacgcacaccgcgcggctgacaggggtgacctccctggtgctagcggtgggtgacgtggaccgtctttccgcgtttgaccgcggagcggcgggcgcggccagccgcacgcgggccgccgggtacctggatgtgcttcttaccgttcgtctcgctcgctccaaacacggacagtctgtgtaacagaccccaataaacgtatgtcgctaccacacccttgtgtgtcaatggacgcctctccgggggggaagggaaaacaaagaggggctgggggagcggcaccactggggcctgaacaaacaaacaaaccacagacacggttacagtttattcggtcgggcggataaacggccgaagccacgccccctttattcgcgtctccaaaaaaacgggacacttgtccggagaacctttaggatgccagccagggcggcggtaatcataaccacgcccagcgcagaggcggccagaaacccgggcgcaattgcggccacgggctgcgtgtcaaaggctagcaaatgaatgacggttccgtttggaaatagcaacaaggccgtggacggcacgtcgctcgaaaacacgctcggggcgccctccgtcggcccggcggcgatttgctgctgtgtgttgtccgtatccaccagcaacacagacatgacctccccggctggggtgtagcgcataaacacggcccccacgagccccaggtcgcgctggttttgggtgcgcaccagccgcttggactcgatatcccgggtggagccttcgcatgtcgcggtgaggtaggttaggaacagtgggcgtcggacgtcgacgccggtgagcttgtagccgatcccccggggcagaggggagtgggtgacgacgtagctggcgttgtgggtgatgggtaccaggatccgtggctcgacgttggcagactgccccccgcaccgatgtgaggcctcagggacgaaggcgcggatcagggcgttgtagtgtgcccagcgcgtcagggtcgaggcgaggccgtgggtctgctgggccaggacttcgaccggggtctcggatcgggtggcttgagccagcgcgtccaggataaacacgctctcgtctagatcaaagcgcagggaggccgcgcatggcgaaaagtggtccggaagccaaaagagggttttctggtggtcggcccgggccagcgcggtccggaggtcggcgttggtcgctgcggcgacgtcggacgtacacagggccgatgctatcagaaggctccggcgggcgcgttcccgctgcaccgccgaggggacgcccgccaagaacggctgccggaggacagccgaggcgtaaaatagcgcccggtggacgaccggggtggtcagcacgcggccccctagaaactcggcatacagggcgtcgatgagatgggctgcgctgggcgccactgcgtcgtacgccgaggggctatccagcacgaaggccagctgatagcccagcgcgtgtaatgccaagctctgttcgcgctccagaatctcggccaccaggtgctggagccgagcctctagctgcaggcgggccgtgggatccaagactgacacattaaaaaacacagaatccgcggcacagcccgcggccccgcgggcggccaacccggcaagcgcgcgcgagtgggccaaaaagcctagcaggtcggagaggcagaccgcgccgtttgcgtgggcggcgttcacgaaagcaaaacccgacgtcgcgagcagccccgttaggcgccagaagagaggggggcgcgggccctgctcggcgcccgcgtcccccgagaaaaactccgcgtatgcccgcgacaggaactgggcgtagttcgtgccctcctccgggtagccgcccacgcggcggagggcgtccagcgcggagccgttgtcggcccgcgtcagggaccctaggacaaagacccgataccgggggccgcccgggggcccgggaagagcccccggggggttttcgtccgcggggtccccgacccgatctagcgtctggcccgcggggaccaccatcacttccaccggagggctgtcgtgcatggatatcacgagccccatgaattcccgcccgtagcgcgcgcgcaccagcgcggcatcgcacccgagcaccagctcccccgtcgtccagatgcccacgggccacgtcgaggccgacggggagaaatacacgtacctacctggggatctcaacaggccccgggtggccaaccaggtcgtggacgcgttgtgcaggtgcgtgatgtccagctccgtcgtcgggtgccgccgggccccaaccggcggtcgggggggcggtgtatcacgcggcccgcttgggtggctcgccgtcgccacgttgtctccccgcgggaacgtcagggcctcggggtcagggacggccgaaaacgttacccaggcccgggaacgcagcaacacggaggcgactggattgtacaagagacccttaaggggggcgaccgaggggggaggctgggcggtcggctcgaccgtggtgggggcgggcaggctcgcgttcgggggccggccgagcaggtaggtcttcgggatgtaaagcagctggccggggtcccgcggaaactcggccgtggtgaccaatacaaaacaaaagcgctcctcgtaccagcgaagaaggggcagagatgccgtagtcaggtttagttcgtccggcggcgccagaaatccgcgcggtggtttttgggggtcgggggtgtttggcagccacagacgcccggtgttcgtgtcgcgccagtacatgcggtccatgcccaggccatccaaaaaccatgggtctgtctgctcagtccagtcgtggacctgaccccacgcaacgcccaaaataataacccccacgaaccataaaccattccccatgggggaccccgtccctaacccacggggcccgtggctatggcagggcttgccgccccgacgttggctgcgagccctgggccttcacccgaacttggggggtggggtggggaaaaggaagaaacgcgggcgtattggccccaatggggtctcggtggggtatcgacagagtgccagccctgggaccgaaccccgcgtttatgaacaaacgacccaacacccgtgcgttttattctgtctttttattgccgtcatagcgcgggttccttccggtattgtctccttccgtgtttcagttagcctcccccatctcccgggcaaacgtgcgcgccaggtcgcagatcgtcggtatggagccgggggtggtgacgtgggtctggaccatcccggaggtaagttgcagcagggcgtcccggcagccggcgggcgattggtcgtaatccaggataaagacgtgcatgggacggaggcgtttggccaagacgtccaaggcccaggcaaacacgttgtacaggtcgccgttgggggccagcaactcgggggcccgaaacagggtaaataacgtgtccccgatatggggtcgtgggcccgcgttgctctggggctcggcaccctggggcggcacggccgtccccgaaagctgtccccaatcctcccgccacgacccgccgccctgcagataccgcaccgtattggcaagcagcccgtaaacgcggcgaatcgcggccagcatagccaggtcaagccgctcgccggggcgctggcgtttggccaggcggtcgatgtgtctgtcctccggaagggcccccaacacgatgtttgtgccgggcaaggtcggcgggatgagggccacgaacgccagcacggcctggggggtcatgctgcccataaggtatcgcgcggccgggtagcacaggagggcggcgatgggatggcggtcgaagatgagggtgagggccgggggcggggcatgtgagctcccagcctcccccccgatatgaggagccagaacggcgtcggtcacggcataaggcatgcccattgttatctgggcgcttgtcattaccaccgccgcgtccccggccgatatctcaccctggtcgaggcggtgttgtgtggtgtagatgttcgcgattgtctcggaagcccccagcacctgccagtaagtcatcggctcgggtacgtagacgatatcgtcgcgcgaacccagggccaccagcagttgcgtggtggtggttttccccatcccgtgaggaccgtctatataaacccgcagtagcgtgggcattttctgctccaggcggacttccgtggcttcttgctgccggcgagggcgcaacgccgtacgtcggttgctatggccgcgagaacgcgcagcctggtcgaacgcagacgcgtgttgatggcaggggtacgaagccatacgcgcttctacaaggcgcttgccgaagaggtgcgggagtttcacgccaccaagatctgcggcacgctgttgacgctgttaagcgggtcgctgcagggtcgctcggtgttcgaggccacacgcgtcaccttaatatgcgaagtggacctgggaccgcgccgccccgactgcatctgcgtgttcgaattcgccaatgacaagacgctgggcggggtttgtgtcatcatagaactaaagacatgcaaatatatttcttccggggacaccgccagcaaacgcgagcaacgggccacggggatgaagcagctgcgccactccctgaagctcctgcagtccctcgcgcctccgggtgacaagatagtgtacctgtgccccgtcctggtgtttgtcgcccaacggacgctccgcgtcagccgcgtgacccggctcgtcccgcagaaggtctccggtaatatcaccgcagtcgtgcggatgctccagagcctgtccacgtatacggtccccatggagcctaggacccagcgagcccgtcgccgccgcggcggcgccgcccgggggtctgcgagcagaccgaaaaggtcacactctggggcgcgcgacccgcccgagtcagcggcccgccagttaccacccgccgaccaaacccccgcctccacggagggcgggggggtgcttaagaggatcgcggcgctcttctgcgtgcccgtggccaccaagaccaaaccccgagccgcctccgaatgagagtgtttcgttccttccccctccccccgcgtcagacaaaccctaaccaccgcttaagcggcccccgcgaggtccgaagactcatttggatccggcgggagccacccgacaacagcccccgggttttcccacgccagacgccggtccgctgtgccatcgcgccccctcatcccaccccccatcttgtccccaaataaaacaaggtctggtagttaggacaacgaccgcagttctcgtgtgttattttcgctctccgcctctcgcagatggacccgtactgcccatttgacgctctggacgtctgggaacacaggcgcttcatagtcgccgattcccgaaacttcatcacccccgagttcccccgggacttttggatgtcgcccgtctttaacctcccccgggagacggcggcggagcaggtggtcgtcctacaggcccagcgcacagcggctgccgctgccctggagaacgccgccatgcaggcggccgagctccccgtcgatatcgagcgccggttacgcccgatcgaacggaacgtgcacaagatcgcaggcgccctggaggcgctggagacggcggcggccgccgccgaagaggcggatgccgcgcgcggggatgagccggcgggtgggggcgacgggggggcgcccccgagtctggccgtcgcggagatggaggtccagatcgtgcgcaacgacccgccgctacgatacgacaccaacctccccgtggatctgctacacatggtgtacgcgggccgcggggcgaccggatcgtcgggggtggtgttcgggacctggtaccgcactatccaggaccgcaccatcacggactttcccctgaccacccgcagtgccgactttcgggacggccgtatgtccaagaccttcatgacggcgctggtactgtccctgcagtcgtgcggccggctgtatgtgggccagcgccactattccgccttcgagtgcgccgtgttgtgtctctacctgctgtaccgaaacacgcacggggccgccgacgatagcgaccgcgctccggtcacgttcggggatctgctgggccggctgccccgctacctggcgtgcctggccgcggtgatcgggaccgagggcggccggccacagtaccgctaccgcgacgacaagctccccaagacgcagttcgcggccggcgggggccgctacgaacacggagcgctggcgtcgcacatcgtgatcgccacgctgatgcaccacggggtgctcccggcggccccgggggacgtcccccgggacgcgagcacccacgttaaccccgacggcgtggcgcaccacgacgacataaaccgcgccgccgccgcgttcctcagccggggccacaacctattcctgtgggaggaccagactctgctgcgggcaaccgcgaacaccataacggccctgggcgttatccagcggctcctcgcgaacggcaacgtgtacgcggaccgcctcaacaaccgcctgcagctgggcatgctgatccccggagccgtcccttcggaggccatcgcccgtggggcctccgggtccgactcgggggccatcaagagcggagacaacaatctggaggcgctatgtgccaattacgtgcttccgctgtaccgggccgacccggcggtcgagctgacccagctgtttcccggcctggccgccctgtgtcttgacgcccaggcggggcggccggtcgggtcgacgcggcgggtggtggatatgtcatcgggggcccgccaggcggcgctggtgcgcctcaccgccctggaactcatcaaccgcacccgcacaaaccccacccccgtgggggaggttatccacgcccacgacgccctggcgatccaatacgaacaggggcttggcctgctggcgcagcaggcacgcattggcttgggctccaacaccaagcgtttctccgcgttcaacgttagcagcgactacgacatgttgtactttttatgtctggggttcattccacagtacctgtcggcggtttagtgggtggtgggcgaggggggagggggcattagggagaaagaacaagagcctccgttgggttttctttgtgcctgtactcaaaaggtcataccccgtaaacggcgggctccagtcccggcccggcggttggcgtgaacgcaacggcgggagctgggttagcgtttagtttagcattcgctctcgcctttccgcccgccccccgaccgttgcgccttttttttttttcgtccaccaaagtctctgtgggtgcgcgcatggcagccgatgccccgggagaccggatggaggagcccctgccagacagggccgtgcccatttacgtggctgggtttttggccctgtatgacagcggggactcgggcgagttggcattggatccggatacggtgcgtgcggccctgcctccggataacccactcccgattaacgtggaccaccgcgctggctgcgaggtggggcgggtgctggccgtggtcgacgacccccgcgggccgttttttgtgggactgatcgcctgcgtgcaactggagcgcgtcctcgagacggccgccagcgctgcgattttcgagcgccgcgggccgccgctctcccgggaggagcgcctgttgtacctgatcaccaactacctgccctcggtctccctggccacaaaacgcctggggggcgaggcgcaccccgatcgcacgctgttcgcgcacgtcgcgctgtgcgcgatcgggcggcgcctcggcactatcgtcacctacgacaccggtctcgacgccgccatcgcgccctttcgccacctgtcgccggcgtctcgcgagggggcgcggcgactggccgccgaggccgagctcgcgctgtccggacgcacctgggcgcccggcgtggaggcgctgacccacacgctgctttccaccgccgttaacaacatgatgctgcgggaccgctggagcctggtggccgagcggcggcggcaggccgggatcgccggacacacctacctccaggcgagcgaaaaattcaaaatgtggggggcggagcctgtttccgcgccggcgcgcgggtataagaacggggccccggagtccacggacataccgcccggctcgatcgctgccgcgccgcagggtgaccggtgcccaatcgtccgtcagcgcggggtcgcctcgcccccggtactgccccccatgaaccccgttccggcatcgggcaccccggcccccgcgccgcccggcgacgggagctacctgtggatcccggcctcccattacaaccagctcgtcgccggccacgccgcgccccaaccccagccgcattccgcgtttggtttcccggctgcggcgggggccgtggcctatgggcctcacggcgcgggtctttcccagcattaccctccccacgtcgcccatcagtatcccggggtgctgttctcgggacccagcccactcgaggcgcagatagccgcgttggtgggggccatagccgcggaccgccaggcgggcggtcagacggccgcgggagaccctggggtccgggggtcgggaaagcgtcgccggtacgaggcggggccgtcggagtcctactgcgaccaggacgaaccggacgcggactacccgtactaccccggggaggctcgaggcgggccgcgcggggtcgactctcggcgcgcggcccgccagtctcccgggaccaacgagaccatcacggcgctgatgggggcggtgacgtctctgcagcaggaactggcgcacatgcgggctcggaccagcgccccctatggaatgtacacgccggtggcgcactatcgccctcaggtgggggagccggaaccaacaacgacccacccggccctttgtcccccggaggccgtgtatcgccccccaccacacagcgccccctacggtcctccccagggtccggcgtcccatgcccccactcccccgtatgccccagctgcctgcccgccaggcccgccaccgcccccatgtccttccacccagacgcgcgcccctctaccgacggagcccgcgttcccccccgccgccaccggatcccaaccggaggcatccaacgcggaggccggggcccttgtcaacgccagcagcgcagcacacgtggacgttgacacggcccgcgccgccgatttgttcgtctctcagatgatgggggcccgctgattcgccccggtctttggtaccatgggatgtcttactgtatatctttttaaataaaccaggtaataccaaataagacccattggtgtatgttctttttttattgggaggcgcgggtaggcgggtagctttacaatgcaaaagccttcgacgtggaggaaggcgtggggggggaatcggcactgaccaagggggtccgttttgtcacgggaaaggaaagaggaaacaggccgcggacacccgggggagtttatgtgttcccttttctttcttcccacacacacaaaaggcgtaccaaacaaacaaaccaaaagatgcacatgcggtttaacacccgtggtttttatttacaacaaaccccccgtcacaggtcgtcctcgtcggcgtcaccgtctttgttgggaacttgggtgtagttggtgttgcggcgcttgcgcatgaccatgtcggtgaccttggcgctgagcagcgcgctcgtgcccttcttcttggccttgtgttccgtgcgctccatggcagacaccagggccatgtaccgtatcatctcccgggcctcggctagcttggcctcgtcaaagtcgccgccctcctcgccctccccggacgcgtccgggttggtggggttcttgagctccttggtggttagcgggtacagggccttcatggggttgctctgcagccgcatgacgtagcgaaaggcgaagaaagccgccgccaggccggccaggaccaacagacccacggccagcgccccaaaggggttggacatgaaggaggacacgcccgacacggccgataccacgccgcccacgatgcccatcaccaccttgccgaccgcgcgccccaggtcgcccatcccctcgaagaacgcgcccaggcccgcgaacatggcggcgttggcgtcggcgtggatgaccgtgtcgatgtcggcgaagcgcaggtcgtgcagctggttgcggcgctggacctccgtgtagtccagcaggccgctgtccttgatctcgtggcgggtgtacacctccagggggacaaactcgtgatcctccagcatggtgatgttgaggtcgatgaaggtgctgacggtggtgatgtcggcgcggctcagctggtgggagtacgcgtactcctcgaagtacacgtagcccccgccgaaggtgaagtagcgccggtgtcccacggtgcacggctcgatcgcatcgcgcgtcagccgcagctcgttgttctcccccagctgcccctcgaccaacgggccctggtcttcgtaccgaaagctgaccagggggcggctgtagcaggccccgggccgcgagctgatgcgcatcgagttttggacgatcacgttgtccgcggcgaccggcacgcacgtggagacggccatcacgtcgccgagcatccgcgcgctcacccgccggcccacggtggccgaggcgatggcgttggggttcagcttgcgggcctcgttccacagggtcagctcgtgattctgcagctcgcaccacgcgatggcaacgcggcccaacatatcgttgacatggcgctgtatgtggttgtacgtaaactgcagccgggcgaactcgatggaggaggtggtcttgatgcgctccacggacgcgttggcgctggccccgggcggcgggggcgtggggtttgggggcttgcggctctgctctcggaggtgttcccgcacgtacagctccgcgagcgtgttgctgagaaggggctggtacgcgatcagaaagcccccattggccaggtagtactgcggctggcccaccttgatgtgcgtcgcgttgtacctgcgggcgaagatgcggtccatggcgtcgcgggcgtccttgccgatgcagtcccccaggtccacgcgcgagagcgggtactcggtcaggttggtggtgaaggtggtggatatggcgtcggaggagaatcggaaggagccgccgtactcggagcgcagcatctcgtccacctcctgccacttggtcatggtgcagaccgacgggcgctttggcacccagtcccaggccacggtgaacttgggggtcgtgagcaggttccgggtggtcggcgccgtggcccgggccttggtggtgaggtcgcgcgcgtagaagccgtcaacctgcttgaagcggtcggcggcgtagctggtgtgttcggtgtgcgacccctcccggtagccgtaaaacggggacatgtacacaaagtcgccagtcgccagcacaaactcgtcgtacgggtacaccgagcgcgcgtccacctcctcgacgatgcagtttaccgtcgtcccgtaccggtggaacgcctccacccgcgaggggttgtacttgaggtcggtggtgtgccagccccggctcgtgcgggtcgcggcgttggccggtttcagctccatgtcggtctcgtggtcgtcccggtgaaacgcggtggtctccaggttgttgcgcacgtacttggccgtggaccgacagacccccttggcgttgatcttgtcgatcacctcctcgaaggggacgggggcgcggtcctcaaagatccccataaactgggagtagcggtggccgaaccacacctgcgaaacggtgacgtctttgtagtacatggtggccttgaacttgtacggggcgatgttctccttgaagaccaccgcgatgccctccgtgtagttctgaccctcgggccgggtcgggcagcggcgcggctgctcgaactgcaccaccgtggcgcccgtggggggtgggcacacgtaaaagtttgcatcggtgttctccgccttgatgtcccgcaggtgctcgcgcagggtggcgtggcccgcggcgacggtcgcgttgtcgccggcggggcgcggcggcggtgggtttttcggttttttgttcttcttcggtttcgtgtcccccgttggggcggggccaggggcgggcggcgccggagtggcaggtcccccgttcgccgcctgggtcgcggccgcgaccccaggcgtgccgggggaactcggagccgccgacgccaccaggacccccagcgtcaaccccaagagcgcccatacgacgaaccaccggcacccccgcgcgggggcgccctggcgcatggcgggactacgggggcccgtcgtgccccccgtcaggtagcctgggggcgaggtgctggaggaccgagtagaggatcgagaaaacgtctcggtcgtagaccacgaccgaccgggggccgatacagccgtcgggggcgctctcgacgatggccaccagcggacagtcggagtcgtacgtgagatatacgccgggcgggtaacggtaacgaccttcggaggtcgggcggctgcagtccgggcggcgcaactcgagctccccgcaccggtagaccgaggcaaagagtgtggtggcgataatcagctcgcgaatatatcgccaggcggcgcgctgagtgggcgttattccggaaatgccgtcaaaacagtaaaacctctgaaattcgctgacggcccaatcagcacccgagccccccgcccccatgatgaaccgggcgagctcctccttcaggtgcggcaggagccccacgttctcgacgctgtaatacagcgcggtgttggggggctgggcgaagctgtgggtggagtgatcaaagaggggcccgttgacgagctcgaagaagcgatgggtgatgctggggagcagggccgggtccacctggtgtcgcaggagagacgctcgcatgaaccggtgcgcgtcgaacacgcccggcgccgagcggttgtcgatgaccgtgcccgcgcccgccgtcagggcgcagaagcgcgcgcgcgccgcaaagccgttggcgaccgcggcgaacgtcgcgggcagcacctcgccgtggacgctgacccgcagcatcttctcgagctccccgcgctgctcgcggacgcagcgccccaggctggccaacgaccgcttcgtcaggcggtccgcgtacagccgccgtcgctcccgcacgtccgcggccgcttgcgtggcgatgtccccccacgtctcgggcccctgccccccgggcccgcggcgacggtcttcgtcctcgcccccgcccccgggagctcccaacccccgtgccccttcctctacggcgacacggtccccgtcgtcgtcggggcccgcgccgcccttgggcgcgtccgccgcgccccccgcccccatgcgcgccagcacgcgacgcagcgcctcctcgtcgcactgttcggggctgacgaggcgccgcaagagcggcgtcgtcaggtggtggtcgtagcacgcgcggatgagcgcctcgatctgatcgtcgggtgacgtggcctgaccgccgattattagggcgtccaccatatccagcgccgccaggtggctcccgaacgcgcgatcgaaatgctccgcccgccgcccgaacagcgccagttccacggccaccgcggcggtctcctgctgcaactcgcgccgcgccagcgcggtcaggttgctggcaaacgcgtccatggtggtctggccggcgcggtcgccggacgcgagccagaatcgcaattcgctgatggcgtacaggccgggcgtggtggcctgaaacacgtcgtgcgcctccagcagggcgtcggcctccttgcggaccgagtcgttctcgggcgacgggtggggctgcccgtcgccccccgcggtccgggccagcgcatggtccaacacggagagcgcccgcgcgcggtcggcgtccgacagcccggcggcgtggggcaggtaccgccgcagctcgttggcgtccagccgcacctgcgcctgctgggtgacgtggttacagatacggtccgccaggcggcgggcgatcgtcgccccctggttcgccgtcacacacagttcctcgaaacagaccgcgcaggggtgggacgggtcgctaagctccggggggacgataaggcccgaccccaccgcccccaccataaactcccgaacgcgctccagcgcggcggtggcgccgcgcgagggggtgatgaggtggcagtagtttagctgctttagaaagttctcgacgtcgtgcaggaaacacagctccatatggacggtcccgccatacgtatccagcctgacccgttggtgatacggacagggtcgggccaggcccatggtctccgtgaaaaacaccgcgacgtctcccgcggtcgcgaacgtctccaggctgcccaggagccgctcgccctcgcgccacgcgtactctagcagcaactccagggtgaccgacagcggggtgagaaaggccccggcctgggcctccaggcccggcctcagacgacgccgcagcgcccgcacctgaagcgcgttcagcttcagttgggggagcttcccccgtccgatgtgggggtcgcaccgccggagcagctctatctgaaacacataggtctgcacctgtccgagcagggctaacaacttttgacgggccacggtgggctcggacaccggggcggccatctcgcggcgccgatctgtaccgcggccggagtatgcggtggaccgaggcggtccgtacgctacccggcgtctggctgagccccggggtccccctattcggggcggcctcccgcgggcccgccgaccggcaagccgggagtcggcggcgcgtgcgtttctgttctattcccagacaccgcggagaggaatcacggcccgcccagagatatagacacggaacacaaacaagcacggatgtcgtagcaataatttattttacacacattccccgccccgccctaggttcccccaccccccaacccctcacagcatatccaacgtcaggtctccctttttgtcggggggcccctccccaaacgggtcatccccgtggaacgcccgtttgcggccggcaaatgccggtcccggggcccccgggccgccgaacggcgtcgcgttgtcgtcctcgcagccaaaatccccaaagttaaacacctccccggcgttgccgagttggctgactagggcctcggcctcgtgcgccacctccagggccgcgtccgtcgaccactcgccgttgccgcgctccagggcacgtgcggtcagctccatcatctcctcgcttaggtactcgtcctccaggagcgccagccagtcctcgatctgcagctgttgggtgcggggccccaggcttttcacggtcgccacgaacacgctactggcgacggccgccccgccctcggagataatgccccggagctgctcgcacagcgagctttcgtgcgctccgccgccgaggctcgaggccgcgcacacaaacccggcccggggacaggccaggacgaacttgcgggtgcggtcaaaaataaggagcgggcacgcgtttttgccgcccatcaggctggcccagttcccggcctgaaacacacggtcgttgccggccatgccgtagtatttgctgatgctcaaccccaacacgaccatggggcgtgccgccatgacgggccgcagcaggttgcagctggcgaacatggaggtccacgcgcccggatgcgcgtccacggcgtccatcagcgcgcgggccccggcctccaggcccgccccgccctgcgcggaccacgcggccgccgcctgcacgctggggggacggcgggaccccgcgatgatggccgtgagggtgttgatgaagtacgtcgagtgatcgcagtaccgcagaatctggtttgccatgtagtacatcgccagctcgctcacgttgttgggggccaggttaataaagttgatcgcgccgtagtccagggaaaactttttaatgaacgcgatggtctcgatgtcctcgcgcgacaggagccgggcgggaagctggttgcgttggagggccgtccagaaccactgcgggttcggctggttggaccccgggggcttgccgttggggaagatggccgcgtggaactgcttcagcagaaagcccagcggtccgaggaggatgtccacgcgcttgtcgggcttctggtaggcgctctggaggctggcgacccgcgccttggcggcctcggacgcgttggcgctcgcgcccgcgaacaacacgcggctcttgacgcgcagctccttgggaaaccccagggtcacgcgggcaacgtcgccctcgaagctgctctcggcgggggccgtctggccggccgtcaggctgggggcgcagatagccgcaccctccgagagcgcgaccgtcagcgttttggccgacagaaacccgttgttaaacatgtccatcacgcgccgccgcagcaccggttggaattgattgcgaaagttgcgcccctcgaccgactgcccggcgaacaccccgtggcactggctcagggccaggtcctggtacacggcgaggttggatcgccgcccgagaagctgaagcagggggcacggcccgcacgcgtacgggtccagcgtcagggacatggcgtggttggcctcgcccagaccgtcgcgaaacttgaagttcctcccctccaccaggttgcgcatcagctgctccacctcgcggtccacgacctgcctgacgttgttcaccaccgtatgcagggcctcgcggttggtgatgatggtctccagccgccccatggccgtggggaccgcctggtccacgtactgcagggtctcgagttcggccatgacgcgctcggtcgccgcgcggtacgtctcctgcatgatggtccgggcggtctcggatccgtccgcgcgcttcagggccgagaaggcggcgtagtttcccagcacgtcgcagtcgctgtacatgctgttcatggtcccgaagacgccgatggctccgcgggcggcgctggcgaacttgggatggcgcgcccggaggcgcatgagcgtcgtgtgtacgcaggcgtggcgcgtgtcgaaggtgcacaggttacagggcacgtcggtctggttggagtccgcgacgtatcgaaacacgtccatctcctggcgcccgacgatcacgccgccgtcgcagcgctccaggtaaaacagcatcttggccagcagcgccggggaaaacccacacagcatggccaggtgctcgccggcaaattcctgggttccgccgacgaggggcgcggtgggccgaccctcgaacccgggcaccacgtgtccctcgcggtccacctgtgggttggccgccacgtgggtcccgggcacgaggaagaagcggtaaaaggagggtttgctgtggtcctttgggtccgccgggccggcgtcgtccacctcggtgagatggagggccgagttggtgctaaataccatggcccccacgagtcccgcggcgcgcgccaggtacgccccgacggcgttggcgcgggccgcggccgtgtcctggccctcgaacagcggccacgcggagatgtcggtgggcggctcgtcaaagacggccatcgacacgatagactcgagggccagggcggcgtctccggccatgacggaggccaggcgctgttcgaacccgcccgcagggcccttgccgccgccgtcgcgcccgccccgcggggtcttaccctggctggcttcgaaggccgtgaacgtaatgtcggcggggagggcggcgccctcgtggttttcgtcaaacgccaggtgggcggccgcgcgggccacggcgtccacgtttcggcatcgcagtgccacggcggcgggtcccacgaccgcctcgaacaggaggcggtggagggggcggttaaaaaacggaagcgggtaggtaaaattctccccgatcgatcggtggttggcgttgaacggctctgcgatgacacggctaaaatccggcatgaacagctgcaacgggtacacgggtatgcggtgcacctccgccccgcctatggttaccttgtccgagcctcccaggtgcagaaaggtgttgttgatgcacacggcctccttgaagccctcggtaacgaccagatacaggagggcgcggtccgggtccaggccgaggcgctcacacagcgcctcccccgtcgtctcgtgtttgaggtcgccgggccggggggtgtagtccgaaaagccaaaatggcggcgtgcccgctcgcagagtcgcgtcaggttcggggcctgggtgctggggtccaggtgccggccgccgtgaaagacgtacacggacgagctgtagtgcgagggcgtcagtttcagggacaccgcggtacccccgagccccgtcgtgcgagaacccacgaccacggccacgttggcctcaaagccgctctccacggtcaggcccacgaccaggggcgccacggcgacgtcggcatcgccgctgcgcgccgacagtaacgccagaagctcgatgccttcggacggacacgcgcgagcgtacacgtatcccaggggcccgggggggaccttgatggtggttgccgtcttgggctttgtctccatgtccttctgtcaatcggtccgcgaacggaggtaatcccggcacgacgacggacgcccgacaaggtatgtctcccgagcgtcaaaatccgggggggggggcggcgacggtcaaggggagggttggagaccggggttggggaatgaatccctacccttcaccgacaaccccccgggtaatcacggggtgccgatgaaccccggcggccggcaacgcggggtccctgcgagaggcacagatgcttacggtcaggtgctccgggtcgggtgcgtctggtatgcggttggtatatgtacactttacctgggggcgtgcctggccgccccagcccctcccacgccctgcgcgtcatcagccggtgggcgtggccgctattataaaaaaagtgagaacgcgaagcgttcgcactttgtcctaataatatatatattattaggacaaagtgcgaacgcttcgcgttctcactttttttataatagcggccacgcccaccggctacgtcacgctcctgtcggccgccggcggtccataagcccggccggccgggccgacgcgaataaaccgggccgccggccggggcgccgcgcagcagctcgccgcccggatccgccagacaaacaaggcccttgcacatgccggcccgggcgagcctgggggtccggtaattttgccatcccacccaagcggctttttgggtttttctcttcccccctccccacatcccccctctttaggggttcgggtggtaacaaccgcgatgttttccggtggcggcggcccgctgtcccccggaggaaagtcggcggccagggcggcgtccgggttttttgcgcccgccggccctcgcggagccggccggggacccccgccttgcttgaggcaaaacttttacaacccctacctcgccccagtcgggacgcaacagaagccgaccgggccaacccagcgccatacgtactatagcgaatgcgatgaatttcgattcatcgccccgcgggtgctggacgaggatgcccccccggagaagcgcgccggggtgcacgacggtcacctcaagcgcgcccccaaggtgtactgcgggggggacgagcgcgacgtcctccgcgtcgggtcgggcggcttctggccgcggcgctcgcgcctgtggggcggcgtggaccacgccccggcggggttcaaccccaccgtcaccgtctttcacgtgtacgacatcctggagaacgtggagcacgcgtacggcatgcgcgcggcccagttccacgcgcggtttatggacgccatcacaccgacggggaccgtcatcacgctcctgggcctgactccggaaggccaccgggtggccgttcacgtttacggcacgcggcagtacttttacatgaacaaggaggaggtcgacaggcacctacaatgccgcgccccacgagatctctgcgagcgcatggccgcggccctgcgcgagtccccgggcgcgtcgttccgcggcatttccgcggaccacttcgaggcggaggtggtggagcgcaccgacgtgtactactacgagacgcgccccgctctgttttaccgcgtctacgtccgaagcgggcgcgtgctgtcgtacctgtgcgacaacttctgcccggccatcaagaagtacgagggtggggtcgacgccaccacccggttcatcctggacaaccccgggttcgtcaccttcggctggtaccgtctcaaaccgggccggaacaacacgctagcccagccgcgggccccgatggccttcgggacatccagcgacgtcgagtttaactgtacggcggacaacctggccatcgaggggggcatgagcgacctaccggcatacaagctcatgtgcttcgatatcgaatgcaaggcggggggggaggacgagctggcctttccggtggccgggcacccggaggacctggtcatccagatatcctgtctgctctacgacctgtccaccaccgccctggagcacgtcctcctgttttcgctcggttcctgcgacctccccgaatcccacctgaacgagctggcggccaggggcctgcccacgcccgtggttctggaattcgacagcgaattcgagatgctgttggccttcatgacccttgtgaaacagtacggccccgagttcgtgaccgggtacaacatcatcaacttcgactggcccttcttgctggccaagctgacggacatttacaaggtccccctggacgggtacggccgcatgaacggccggggcgtgtttcgcgtgtgggacataggccagagccacttccagaagcgcagcaagataaaggtgaacggcatggtgaacatcgacatgtacgggattataaccgacaagatcaagctctcgagctacaagctcaacgccgtggccgaagccgtcctgaaggacaagaagaaggacctgagctatcgcgacatccccgcctactacgccgccgggcccgcgcaacgcggggtgatcggcgagtactgcatacaggattccctgctggtgggccagctgttttttaagtttttgccccatctggagctctcggccgtcgcgcgcttggcgggtattaacatcacccgcaccatctacgacggccagcagatccgcgtctttacgtgcctgctgcgcctggccgaccagaagggctttattctgccggacacccaggggcgatttaggggcgccgggggggaggcgcccaagcgtccggccgcagcccgggaggacgaggagcggccagaggaggagggggaggacgaggacgaacgcgaggagggcgggggcgagcgggagccggagggcgcgcgggagaccgccggccggcacgtggggtaccagggggccagggtccttgaccccacttccgggtttcatgtgaaccccgtggtggtgttcgactttgccagcctgtaccccagcatcatccaggcccacaacctgtgcttcagcacgctctccctgagggccgacgcagtggcgcacctggaggcgggcaaggactacctggagatcgaggtgggggggcgacggctgttcttcgtcaaggctcacgtgcgagagagcctcctcagcatcctcctgcgggactggctcgccatgcgaaagcagatccgctcgcggattccccagagcagccccgaggaggccgtgctcctggacaagcagcaggccgccatcaaggtcgtgtgtaactcggtttacgggttcacgggagtgcagcacggactcctgccgtgcctgcacgttgccgcgacggtgacgaccatcggccgcgagatgctgctcgcgacccgcgagtacgtccacgcgcgctgggcggccttcgaacagctcctggccgatttcccggaggcggccgacatgcgcgcccccgggccctattccatgcgcatcatctacggggacacggactccatctttgtgctgtgccgcggcctcacggccgccgggctgacggccgtgggcgacaagatggcgagccacatctcgcgcgcgctgtttctgtcccccatcaaactcgagtgcgaaaagacgttcaccaagctgctgctgatcgccaagaaaaagtacatcggcgtcatctacgggggtaagatgctcatcaagggcgtggatctggtgcgcaaaaacaactgcgcgtttatcaaccgcacctccagggccctggtcgacctgctgttttacgacgataccgtatccggagcggccgccgcgttagccgagcgccccgcagaggagtggctggcgcgacccctgcccgagggactgcaggcgttcggggccgtcctcgtagacgcccatcggcgcatcaccgacccggagagggacatccaggactttgtcctcaccgccgaactgagcagacacccgcgcgcgtacaccaacaagcgcctggcccacctgacggtgtattacaagctcatggcccgccgcgcgcaggtcccgtccatcaaggaccggatcccgtacgtgatcgtggcccagacccgcgaggtagaggagacggtcgcgcggctggccgccctccgcgagctcgacgccgccgccccaggggacgagcccgccccccccgcggccctgccctccccggccaagcgcccccgggagacgccgttgcatgccgaccccccgggaggcgcgtccaagccccgcaagctgctggtgtccgagctggccgaggatcccgcatacgccattgcccacggcgtcgccctgaacacggactattacttctcccacctgttgggggcggcgtgcgtgacattcaaggccctgtttgggaataacgccaagatcaccgagagtctgttaaaaaggtttattcccgaagtgtggcaccccccggacgacgtggccgcgcggctccgggccgcagggttcggggcggtgggtgccggcgctacggcggaggaaactcgtcgaatgttgcatagagcctttgatactctagcatgagccccccgtcgaagctgatgtccctcattttacaataaatgtctgcggccgacacggtcggaatctccgcgtccgtgggtttctctgcgttgcgccggaccacgagcacaaacgtgctctgccacacgtgggcgacgaaccggtaccccgggcacgcggtgagcatccggtctatgagccggtagtgcaggtgggcggacgtgccgggaaagatgacgtacagcatgtggcccccgtaagtggggtccgggtaaaacaacagccgcgggtcgcacgccccgcctccgcgcaggatcgtgtggacgaaaaaaagctcgggttggccaagaatcccggccaagaggtcctggaggggggcgttgtggcggtcggccaacacgaccaaggaggccaggaaggcgcgatgctcgaatatcgtgttgatctgctgcacgaaggccaggattagggcctcgcggctggtggcggcgaaccgcccgtctcccgcgttgcacgcgggacagcaacccccgatgcctaggtagtagcccatcccggagagggtcaggcagttgtcggccacggtctggtccagacagaagggcagcgagacgggagtggtcttcaccaggggcaccgagagcgagcgcacgatggcgatctcctcggagggcgtctgggcgagggcggcgaaaaggccccgatagcgctggcgctcgtgtaaacacagctcctgtttgcgggcgtgaggcggcaggctcttccgggaggcccgacgcaccacgcccagagtcccgccggccgcagaggagcgcgaccgccggcgctccttgccgtgatagggcccgggccgggagccgcggcgatgggggtcggtgtcatacataggtacacagggtgtgctccagggacaggagcgagatcgagtggcgtctaagcagcgcgcccgcctcacggacaaatgtggcgagcgcggtgggctttggtacaaatacctgatacgtcttgaaggtgtagatgagggcacgcaacgctatgcagacacgcccctcgaactcgttcccgcaggccagcttggccttgtggagcagcagctcgtcgggatgggtggcggggggatggccgaacagaacccaggggtcaacctccatctccgtaatggcgcacatggggtcacagaacatgtgcttaaagatggcctcgggccccgcggcccgaagcaggctcacaaaccggcccccgtccccgggctgcgtctcggggtcagcctcgagctggtcgacgacgggtacgatacagtcgaagaggctcgtgttgttttccgagtagcggaccacggaggcccggagtctgcgcagggccagccagtaagcacgcaccagtaacaggttacacagcaggcattctccgccggtgcgcccgcgcccccggccgtgtttcagcacggtggccatcagagggcccaggtcgaggtcgggctgggcatcgggttcggtaaactgcgcaaagcgcggagccacgtcgcgcgtgcgtgccccgcgatgcgcttcccaggactggcggaccgtggcgcgacgggcctccgcggcagcgcgcagctggggccccgactcccagacggcgggggtgccggcgaggagcagcaggaccagatccgcgtacgcccacgtatccggcgactcctccggctcgcggtccccggcgaccgtctcgaattccccgttgcgagcggcggcgcgcgtacagcagctgtccccgcccccgcgccgaccctccgtgcagtccaggagacgggcgcaatccttccagttcatcagcgcggtggtgagcgacggctgcgtgccggatcccgccgaccccgccccctcctcgcccccggaggccaaggttccgatgagggcccgggtggcagactgcgccaggaacgagtagttggagtactgcaccttggcggctcccggggagggcgagggcttgggttgcttctgggcatgccgcccgggcaccccgccgtcggtacggaagcagcagtggagaaaaaagtgccggtggatgtcgtttatggtgagggcaaagcgtgcgaaggagccgaccagggtcgccttcttggtgcgcagaaagtggcggtccatgacgtacacaaactcgaacgcggccacgaagatgctagcggcgcagtggggcgcccccaggcatttggcacagagaaacgcgtaatcggccacccactgaggcgagaggcggtaggtttgcttgtacagctcgatggtgcggcagaccagacagggccggtccagcgcgaaggtgtcgatggccgccgcggaaaagggcccggtgtccaaaagcccctccccacagggatccgggggcgggttgcggggtcctccgcgcccgcccgaaccccctccgtcgcccgcccccccgcgggcccttgagggggcggtgaccacgtcggcggcgacgtcctcgtcgagcgtaccgacgggcggcacacctatcacgtgactggccgtcaggagctcggcgcagagagcctcgttaagagccaggaggctgggatcgaaggccacatacgcgcgctcgaacgcccccgccttccagctgctgccgggggactcttcgcacaccgcgacgctcgccaggaccccggggggcgaagttgccatggctgggcgggaggggcgcacgcgccagcgaactttacgggacacaatccccgactgcgcgctgcggtcccagaccctggagagtctagacgcgcgctacgtctcgcgagacggcgcgcatgacgcggccgtctggttcgaggatatgacccccgccgagctggaggttgtcttcccgactacggacgccaagctgaactacctgtcgcggacgcagcggctggcctccctcctgacgtacgccgggcctataaaagcgcccgacgacgccgccgccccgcagaccccggacaccgcgtgtgtgcacggcgagctgctcgcccgcaagcgggaaagattcgcggcggtcattaaccggttcctggacctgcaccagattctgcggggctgacgcgcgtgctgttgggcgggacggttcgcgaaccctttggtgggtttacgcgggcacgcacgctcccatcgcgggcgccatggcgggactgggcaagccctacaccggccacccaggtgacgccttcgagggtctcgttcagcgaattcggcttatcgtcccatctacgttgcggggcggggacggggaggcgggcccctactctccctccagcctcccctccaggtgcgcctttcagtttcatggccatgacgggtccgacgagtcgtttcccatcgagtatgtactgcggcttatgaacgactgggccgaggtcccgtgcaacccttacctgcgcatacagaacaccggcgtgtcggtgctgtttcaggggttttttcatcgcccacacaacgcccccgggggcgcgattacgccagagcggaccaatgtgatcctggggtccaccgagacgacggggttgtccctcggcgacctggacaccatcaaggggcggctcggcctggatgcccggccgatgatggccagcatgtggatcagctgctttgtgcgcatgccccgcgtgcagctcgcgtttcggttcatgggccccgaagatgccggacggacgagacggatcctgtgccgcgccgccgagcaggctattacccgtcgccgccgaacccggcggtcccgggaggcgtacggggccgaggccgggctgggggtggccggaacgggtttccgggccaggggggacggttttggcccgctccccttgttaacccaagggccctcccgcccgtggcaccaggccctgcggggtcttaagcacctacggattggcccccccgcgctcgttttggcggcgggactcgtcctgggggccgctatttggtgggtggttggtgctggcgcgcgcctataaaaaaggacgcaccgccgccctaatcgccagtgcgttccggacgccttcgccccacacagccctcccgaccgacacccccatatcgcttcccgacctccggtcccgatggccgtcccgcaatttcaccgccccagcaccgttaccaccgatagcgtccgggcgcttggcatgcgcgggctcgtcttggccaccaataactctcagtttatcatggataacaaccacccacacccccagggcacccaaggggccgtgcgggagtttctccgcggtcaggcggcggcactgacggaccttggtctggcccacgcaaacaacacgtttaccccgcagcctatgttcgcgggcgacgcaccggccgcctggttgcggcccgcgtttggcctgcggcgcacctattcaccttttgtcgttcgagaaccttcgacgcccgggaccccgtgaggcccagggagttccttctggggtgttttaatcaataaaagaccacaccaacgcacgagccttgcgtttaatgtcgtgtttattcaagggagtgggatagggttcgacggttcgaaacttaacacaccaaataatcgagcgcgtctagcccagtaacatgcgcacgtgatgtaggctggtcagcacggcgtcgctgtgatgaagcagcgcccggcgggtccgctgtaactgctgttgtaggcggtaacaggcgcggatcagcaccgccagggcgctacgaccggtgcgttgcacgtagcgtcgcgacagaactgcgtttgccgatacgggcggggggccgaattgtaagcgcgtcacctcttgggagtcatcggcggataacgcactgaatggttcgttggttatgggggagtgtggttccccagggagtgggtcgagcgcctcggcctcggaatccgagaggaacaacgaggtggcgtcggagtcttcgtcgtcagagacatacagggtctgaagcagcgacacgggcgggggggtagcgtcgatgtgtagcgcgagggaggatgcccacgaagacaccccagacaaggagctgcccgtgcgtggatttgtggaagacgcggaagccgggacggatgggcggttttgcggtgcccggaaccgaaccgccggatactccccgggtgctacatgcccgttttggggctggggttggggctggggttggggctggggttggggctggggttggggctggggttggggctggggttggggttggggttggggctggggttggggttggggctggggctggggctggggctggggctggggctggggctggggctggggctggggctggggctggggctggggctggggctggggctggggctggggttggggcgcggacaggcggctgacggtcaaatgcccccgggggcgcgcagatgtggtgggcgtggccaccggctgccgtgtagtggggcggcgggaaaccgggcctccgggcgtaacaccgccctccagcgtcaagtatgtggggggcgggcctgacgtcgggggcggggtgacgggttggaccgcgggaggcgggggagagggacctgcgggagaggatgaggtcggctcggccgggttgcggcctaaaacaggggccgtggggtcggcggggtcccagggtgaagggagggattcccgcgattcggacagcgacgcgacagcggggcgcgtaaggcgccgctgcggcccgcctacgggaaccctggggggggttggcgcgggacccgaggttagcggggggcggcggttttcgcccccgggcaaaaccgtgccggttgcgaccgggggcggaacgggatcgatagggagagcgggagaagcctggccggcggactggggaccgagcgggaggggcacaccagacaccaaagcgtggggcgctggctctgggggtttgggaggggccggggggcgcgcgaaatcggtaaccggggcgaccgtgtcggggagggcaggcggccgccaaccctgggtggtcgcggaagcctgggtggcgcgcgccagggagcgtgcccggcggtgtcggcgcgcgcgcgacccggacgaagaagcggtagaagcgcgggaggaggcgggggggcggggggcggtggcatcggggggcgccggggaactttggggggacggcaagcgccggaagtcgtcgcgggggcccacgggcgccggccgcgtgctttcggccgggacgcccggtcgtgcttcgcgagccgtgactgccggcccagggggccgcggtgcacactgggacgtggggacggactgatcggcggtgggcgaaagggggtccggggcaaggaggggcgcggggccgccggagtcgtcagacgcgagctcctccaggccgtgaatccatgcccacatgcgaggggggacgggctcgccgggggtggcgtcggtgaatagcgtgggggccaggcttccgggccccaacgagccctccgccccaacaaggtccgccgggccgggggtcgggttcgggaccgaggggctctggtcgtcgggggcgcgctggtacaccggatgccccgggaatagctcccccgacaggagggaggcgtcgaacggccgcccgaggatagctcgcgcgaggaaggggtcctcgtcggtggcgctcgcggcgaggacgtcctcgccgcccgccacaaacgggagctcctcggtggcctcgctgccaacaaaccgcatgtcgggggggccgggggggtccgggttttcccacaacaccgcgaccggggtcatggagatgtccacgagcaccaggcacggcgggccccgggcgaggggccgctcggcgatgagcgcggacaggcgcgggagctgtgccgccagacacgcgttttcgatcgggttaaggtcggcgtgcaggaggcggacggcccacgtctcgatgtcggacgacacggcatcgcgcaaggcggcgtccggcccgcgagcgcgtgagtcaaacagcgtgaggcacagctccagttccgactcgcgggaaaaggccgtggtgttgcggagcgccacgacgacgggcgcgcccaggagcactgccgccagcaccaggtccatggccgtaacgcgcgccgcgggggtgcggtgggtggcggcggccggcacggcgacgtgctggcccgtgggccggtagagggcgttggggggagcggggggtgacgcctcgcgcccccccgaggggctcagcgtctgcccagattccagacgcgcggtcagaagggcgtcgaaactgtcatactctgtgtagtcgtccggaaacatgcaggtccaaagagcggccagcgcggtgcttgggagacacatgcgcccgaggacgctcaccgccgccagcgcctgggcgggactcagctttcccagcgcggcgccgcgctcggttcccagctcggggaccgagcgccagggcgccagggggtcggtttcggacaacttgccgcggcgccagtctgccagccgcgtgccgaacatgaggccccgggtcggagggcctccggccgaaaacgctggcagcacgcggatgcgggcgtctggatgcggggtcaggcgctgcacgaatagcatggaatctgctgcgttctgaaacgcacgggggagggtgagatgcatgtactcgtgttggcggaccagatccaggcgccaaaaggtgtaaatgtgttccggggagctggccaccagcgccaccagcacgtcgttctcgttaaaggaaacgcggtgcctagtggagctctggggtccgagcggcggccccggggccgccgcgtcacccccccattccagctgggcccagcgacacccaaactcgcgcgtgagagtggtcgcgacgagggcgacgtagagctcggccgccgcatccatcgaggccccccatctcgcctggcggtggcgcacaaagcgtccgaagagctgaaagttggcggcctgggcgtcgctgagggccagctgaagccggttgatgacggtgaggacgtacatggccgtgacggtcgaggccgactccagggtgtccgtcggaagcggggggcgaatgcatgccgcctcgggacacatcagcagcgcgccgagcttgtcggtcacggccgggaagcagagcgcgtactgcagtggcgttccatccgggaccaaaaagctgggggcgaacggcctatccagcgtactggtggcctcgcgcagcaccaggggccccgggcctccgctcactcgcaggtacgcctcgccccggcggcgcagcatctgcgggtcggcctcttggccgggtggggcggacgcccgggcgcgggcgtctagggcgcgaagatccacgagcaggggcgcgggcgcggccgccgcgcccgcgcccgtctggcctgtggccttggcgtacgcgctatataagcccatgcggcgttggatgagctcccgcgcgccccggaactcctccaccgcccatggggccaggtccccggccaccgcgtccaattccgccaacaggccccccagggtgtcaaagttcatctcccaggccacccttggcaccacctcgtcccgcagccgggcgctcaggtcggcgtgttgggccacgcgccccccgagctcctccacggccccggcccgctcggcgctcttggcgcccaggacgccctggtacttggcgggaaggcgctcgtagtcccgctgggctcgcagccccgacacagtgttggtggtgtcctgcagggcgcgaagctgctcgcatgccgcgcgaaatccctcgggcgatttccaggcccccccgcgaacgcggccgaagcgaccccatacctcgtcccactccgcctcggcctcctcgaaagacctccgcagggcctcgacgcggcgacgggtgtcgaagagcgactgcaggcgcgcgccctgtcgcgtcaggaggcccgggccgtcgccgctggccgcgcttagcgggtgcgtctcaaaggtgcgctgggcatgttccaaccaggcgaccgcctgcacgtcgagctcgcgcgccttctccgtctggtccaacagaatctcgacctgatccgcgatctcctccgccgagcgcgcctggtccagcgtcttggccacggtcgccgggacggcaaccaccttcagcagggtcttcagattggccagaccctcggcctcgagctgggcccggcgctcgcgcgcggccagcacctcccgcaaccccgccgtgacccgctcggtggcttcggcgcgctgctgtttggcgcgcaccacggcgtccttggtatcggccaggtcctgtcgggtcacgaatgcgacgtagtcggcgtacgccgtgtccttcacggggctctggtccacgcgctccagcgccgccacacacgccaccagcgcgtcctcgctcgggcagggcagggtgacccctgcccggacaagctcggcggccgccgccgggtcgttgcgcaccgcggatatctcctccgcggcggcggccaggtccagcgccacgcttccgatcgcgcgccgcgcgtcggcccggagggcgtccaggcgatcgcggatatccacgtactcggcgtagcccttttgaaaaaacggcacgtactggcgcagggccggcacgccccccaagtcttccgacaggtgtaggacggcctcgtggtagtcgataaacccgtcgttcgcctgggcccgctccagcagcccccccgcgagccgcagaagccgcgccaggggctcggtgtccacccgaaacatgtcggcgtacgtgtcggccgcggccccgaaggccgcgctccagtcgatgcggtgaatggctgcgagcggggggagcatggggtggcgctggttctcgggggtgtatgggttaaacgcaagggccgtctccagggcaagggtcaccgccttggcgttggttcccagcgcctgctcggcccgctttcggaagtcccgggggttgtagccgtgcgtgcccgccagcgcctgcaggcgacggagctcgaccacgtcaaactcggcaccgctttccacgcggtccagcacggcctccacgtcggcggcccagcgctcgtggctactgcgggcgcgctgggccgccatcttctctctgaggtcggcggtggcggcctcaagttcgtcggcgcggcgtcgcgtggcgccgatgacctttcccagctcctgcagggcgcgcccgctgggggagtggtccccggccgtcccttcggcgtgcaacaggcccccgaacctgccctcgtggcccgcgaggctttcccgcgcgccggtggtcgcgcgcgtcgcggcctggatcagggaggcatgctctccctccggttggttggcggcccggcgcacctggacgacaaggtcggcggcagccgaccctaaggtcgtgagctgggcgatggccccccgcgcgtccagggccaaccgagtcgccttgacgtatcccgcggcgctgtcggccatggccgctaggaaggccaggggggaggccgggtcgctggcggccgcgcccagggccgtcactgcgtcgaccaggacgcggtgcgcccgcacggccgcatccaccgtcgacgcggggtctgccgtcgcgacggcggcgctgccggcgttgatggcgttcgagacggcgtgggctatgatcggggcgtgatcggcgaagaactgcaagagaaacggagtctcgggggcgttggcgaacaggttcttcagcaccaccacgaagctgggatgcaagccggacagagccgtcgccgtgtccggagtcgggtgctccagggcatctcggtactgccccagcagcccccacatgtccgcccgcagcgccgccgtaacctccgggggcgccccccgaacggcctcggggaggtccgaccagcccgccggcagggaggcccgcagggtcgtcaggacggccggacaggcctttagccccacaaagtcagggaggggccgcaggaccccctggagtttgtgcaagaacttctcccgggcgtcgcgggccaccttcgcccgctcccgcgctccctcgagcattgcctccagggagcgcgcgcgctcccgcaaacgggcacgcgcatcgggggcgagctctgccgtcagcttggcggcatccatggcccgcgcctgccgcagcgcttcctcggccatgcgcgtggcctctggcgacagcccgccgtcgtcggggtagggcgacgcgccgggcgcaggaacaaaggccgcgtcgctgtccagctgctggcccagggccgcatctagggcgtcgaagcgccgcagctcggccagacccgagctgcggcgcgcctgctggtcgttaatgtcgcggatgctgcgcgccagctcgtccagcggcttgcgttctatcagcccttggttggcggcgtccgtcaggacggagagccaggccgccaggtcctcgggggcgtccagcgtctggccccgctgtatcagatcccgcaacaggatggccgtggggctggtcgcgatcgggggcggggcgggaatggcggcgctctgcgcgatgtcccgcgtgtgctggtcgaagacaggcagggactctagcagctggaccacgggcacgacggcggccgaagccacgtgaaaccggcggtcgttgttgtcgctggcctgcagagccttggcgctgtatacggccccccggtaaaagtactccttaaccgcgccctcgatcgcccgacgggcctgggtccgcacctcctccagccgaacctgaacggcctcggggcccagggggggtgggcgcggagccccctgcggggccgccccggccggggcgggcattacgccgaggggcccggcgtgctgtgagaccgcgtcgaccccgcgagcgagggcgtcgagggcctcgcgcatctggcgatcctccgcctccaccctaatctcttcgccacgggcaaatttggccagagcctggactctatacagaagcggttctgggtgcgtcggggtggcgggggcaaaaagggtgtccgggtgggcctgcgagcgctccagaagccactcgccgaggcgtgtatacagattggccggcggggccgcgcgaagctgcagctccaggtccgcgagttccccgtaaaaggcgtccgtctcccgaatgacatccctagccacaaggatcagcttcgccagcgccaggcgaccgatcagagagttttcgtccagcacgtgctggacgaggggcagatgggcggccacgtcggccaggctcaggcgcgtggaggccagaaagtcccccacggccgttttccggggcagcatgctcagggtaaactccagcagggcggcggccgggccggccaccccggcctgggtgtgcgtccgggccccgttctcgatgagaaaggcgaggacgcgttcaaagaaaaaaataacacagagctccagcagccccggagaagccggatacggcgaccgtaaggcgctgatggtgagccgcgaacacgcggcgacctcgcgggccagggcggcggagcacgcggtgaacttaaccgccgtggcggccacgtttgggtgggcctcgaacagctgggcaaggtctgcgcccgggggctcgggtgagcggcgagtcttcagcgcctcgagggcctgcgaggacgccggaaccgtgggcccgtcgtcctcgcccgcctcggcgaccggcggcccggccgggtcggggggtgccgaggcgaggacaggctccggaacggaggcggggaccgcggccccgacgggggttttgcctttgggggtggatttcttcttggttttggcagggggggccgagcgtttcgttttctcccccgaagtcaggtcttcgacgctggaaggcggagtccaggtgggtcggcggcgcttgggaaggccggccgagtagcgtgcccggtgccgaccaaccgggacgacgcccatctccaggacccgcatgtcgtcgtcatcttcttcggccgcctctgcggcggggggcttgggggcggagggaggcggtggtgggatcgcggagggtgggtcggcggaggggggatccgtgggtggggtacccttcagggccaccgcccatacatcgtcgggcgcccgattcgggcgcttggcctctggttttgccgacggaccggccgtcccccgggatgtctcggaggccctgtcgtcgcgacgggcccgggtcggtggcggcgactgggcggctgtgggcgggtggggccccgtgccccctaccccctcccgggggcccacgccgacgcagggctcccccaggcccgcgatctcgccccgcagggggtgcgtgatggccacgcgccgttcgctgaacgcttcgtcctgcaggtaagtctcgctggccccgtaaagatgcagagccgcggccgtcaagtccgcaggagccgcgggttccgggcccgacggcacgaaaaacaccatggctcccgcccaccgtacgtccgggcgatcgcgggtgtaatacgtcaggtatggatacatgtcccccgcccgcactttggcgatgaacgcgggggtgccctccggaaggccgtgcgggtcaaaaaggtatgcggtgtcgccgtccctgaacagccccatccctagggggccaatggttaggagcgtgtacgacagggggcgcagggcccacgggccggcgaagaacgtgtgtgcggggcattgtgtctccagcaggcccgccgcgggctccccgaagaagcccacctcgccgtatacgcgcgagaagacacagcgcagtccgccgcgcgcccctgggtactcgaggaagttggggagctcgacgatcgaacacatgcgcggcggcccagggcccgcggtcgcgcgcgtccactcgcccccctcgaccaaacaaccctcgatggcctccgcggacagaacgtcgcgagggcccacatcaaatatgaggctgagaaaggacagcgacgagcgcatgcacgataccgacccccccggctccaggtcgggcgcgaactggttccgagcaccggtgaccacgatgtcgcgatcccccccgcgttccatcgtggagtgcggtggggtgcccgcgatcatatgtgccctactggccagagacccggcctgtttatggaccggacccccggggttagtgttgtttccgccacccatgcccccgtaccatggccccggttcccctgattaggctacgagtcgcggtgatcgcttcccaaaaaccgagctgcgtttgtctgtcttgatctttcccccccccgcccgcccgcccgcccgcacaccataacaccgagaacaacacacgggggtgggcgtaacataataaagctttattggtaactagttaacggcaagtccgtgggtggcgcgacggtgtcctccgggctcatctcgtcgtcctcgacgggggtgttggaatgaggcgccccctcgcggtccgcctggcgtgggccgtgcccataggcctccggcttctgtgcgtccatgggcataggcgcggggagactgtttccggcgtcgcggacctccaggtccctgggagactccggtccggctaacggacgaaacgcggaagcgcgaaacacgccgtcggtgacccgcaggagctcgttcatcagtaaccaatccatactcagcgtaacggccagcccctggcgagacagatccacggagtccggaaccgcggtcgtctggcccagggggccgaggctgtagtccccccaggcccctaggtcgcgacggctcgtaagcacgacgcggtcggccgcggggctttgcgggggggcgtcctcgggcgcatgcgccattacctctcggatggccgcggcgcgctggtcggccgagctgaccaagggcgccacgaccacggcgcgctccgtctgcaggcccttccacgtgtcgtggagttcctggacaaactcggccacgggctcgggtcccgcggccgcgcgcgcggcttgatagcaggccgagagacgccgccagcgcgctagaaactgacccatgaagcaaaacccggggacctggtctcccgacagcagcttcgacgcccgggcgtgaatgccggacacgacggacagaaacccgtgaatttcgcgccggaccacggccagcacgttgtcctcgtgcgacacctgggccgccagctcgtcgcacacccccaggtgcgccgtggtttcggtgatgacggaacgcaggctcgcgagggacgcgaccagcgcgcgcttggcgtcgtgatacatgctgcagtactgactcaccgcgtcccccatggcctcggggggccagggccccaggcggtcgggcgtgtccccgaccaccgcatacaggcggcgcccgtcgctctcgaaccgacactcgaaaaaggcggagagcgtgcgcatgtgcagccgcagcagcacgatggcgtcctccagttggcgaatcagggggtctgcgcgctcggcgaggtcctgcagcaccccccgggcggccagggcgtacatgctaatcaacaggaggctggtgcccacctcggggggcggggggggctgcagctggaccaggggccgcagctgctcgacggcacccctggagatcacgtacagctcccggagcagctgctctatgttgtcggccatctgcatagtggggccgaggccgccccgggcggccggttcgaggagggtaatcagcgcgcccagtttggtgcgatggccctcgaccgtggggagatagcccagcccaaagtcccgggcccaggccaacacacgcagggcgaactcgaccgggcgtggaaggtaggccgcgctacacgtggccctcaacgcgtccccgaccaccagggccagaacgtaggggacgaagcccgggtcggcgaggacgttggggtgaatgccctcgagggcggggaagcggatctgggtcgccgcggccaggtggacagagggggcgtggctgggctgcccgacggggagaagcgcggacagcggcgtggccggggtggtgggggtgatgtcccagtgggtctgaccatacacgtcgatccagatgagcgccgtctcgcggagaaggctgggttgaccggaactaaagcggcgctcggccgtctcaaactcccccacgagcgcccgccgcaggctcgccagatgttccgtcggcacggccggacccatgatacgcgccagcgtctggctcagaacgccccccgacaggccgaccgcctcgcagagccgcccgtgcgtgtgctcgctggcgccctggacccgcctgaaagtttttacgtagttggcatagtacccgtattcccgcgccagaccaaacacgttcgaccccgcgagggcaatgcacccaaagagctgctggacttcgccgagtccgtggccggcgggcgtccgcgcggggacgcccgccgccagaaacccctccagggccgaaaggtagtgcgtgcagtgcgagggcgtgaacccagcgtcgatcagggtgttgatcaccacggagggcgaattggtattctggatcaacgtccacgtctgctgcagcagagccagcagccgctgctgggcgccggcggagggctgctccccgagctgcagcaggctggagacggcaggctggaagactgccagtgccgacgaactcaggaacggcacgtcgggatcaaacacggccacgtccgtccgcacgcgcgccattagcgtccccgggggcgcacaggccgagcgcgggctgacgcggctgagggccgtcgacacgcgcacctcctcgcggctgcgaaccatcttgttggcctccagtggcggaatcattatggccgggtcgatctcccgcacggtgtgctgaaactgcgccaacaggggcggcgggaccacagccccccgctcgggggtcgtcaggtactcgtccaccagggccaacgtaaagagggcccgtgtgaggggagtgagggtcgcgtcgtctatgcgctggaggtgcgccgagaacagcgtcacccgattactcaccagggccaagaaccggaggccctcttgcacgaacggggcggggaagagcaggctgtacgccggggtggtaaggttcgcgctgggctgccccaacgggaccggcgccatcttgagcgacgtctccccaagggcctcgatggaggtccgcgggctcatggccaagcagctcttggtgacggtttgccagcggtctatccactccacggcgcactggcggacgcggaccggccccagggccgccgcggtgcgcaggccggcggaatccagcgcatgggacgtgtcggagccggtgaccgcgaggatggtgtccttgatgacctccatctcccggaaggcctggtcgggggcctcggggagagccaccaccaagcggtgtacgagcaacccggggaggttctcggccaagagcgccgtctccggaagcccgtgggcccggtggagcgcgcacaggtgttccagcagcggccgccagcatgcccgcgcgtctgccggggcgatggccgttcccgacaacagaaacgccgccatggcggcgcgcagcttggccgtggccagaaacgccgggtcgtccgccccgtttgccgtctcggccgtgggggttggcggttggcgaaggccggctaggctcgccaataggcgctgcataggtccgtccgagggcggaccggcgggtgaggtcgtgacgacgggggcctcggacgggagaccgcggtctgccatgacgcccggctcgcgtgggtgggggacagcgtagaccaacgacgagaccgggcgggaatgactgtcgtgcgctgtagggagcggcgaattatcgatcccctgcggccctccaggaaccccgcaggcgttgcgagtaccccgcgtcttcgcggggtgttatacggccacttaagtcccggcatcccgttcgcggacccaggcccgggggattgtccggatgtgcgggcagcccggacggcgtgggttgcggactttctgcggggcggcccaaatggccctttaaacgtgtgtatacggacgcgccgggccagtcggccaacacaacccaccggaggcggtagccgcgtttggctgtggggtgggtggttccgccttgcgtgagtgtcctttcgacccccccctcccccgggtcttgctaggtcgcgatctgtggtcgcaatgaagaccaatccgctacccgcaaccccttccgtgtggggcgggagtaccgtggaactcccccccaccacacgcgataccgcggggcagggcctgcttcggtgcgtcctgcgccccccgatctctcgccgcgacggcccagtgctccccagggggtcgggaccccggagggcggccagcacgctgtggttgcttggcctggacggcacagacgcgccccctggggcgctgacccccaacgacgataccgaacaggccctggacaagatcctgcggggcaccatgcgcgggggggcggccctgatcggctccccgcgccatcatctaacccgccaagtgatcctgacggatctgtgccaacccaacgcggatcgtgccgggacgctgcttctggcgctgcggcaccccgccgacctgcctcacctggcccaccagcgcgccccgccaggccggcagaccgagcggctgggcgaggcctggggccagctgatggaggcgaccgccctggggtcggggcgagccgagagcgggtgcacgcgcgcgggcctcgtgtcgtttaacttcctggtggcggcgtgtgccgcctcgtacgacgcgcgcgacgccgccgatgcggtacgggcccacgtcacggccaactaccgcgggacgcgggtgggggcgcgcctggatcgtttttccgagtgtctgcgcgccatggttcacacgcacgtcttcccccacgaggtcatgcggtttttcggggggctggtgtcgtgggtcacccaggacgagctagcgagcgtcaccgccgtgtgcgccgggccccaggaggcggcgcacaccggccacccgggccggccccgctcggccgtgatcctcccggcgtgtgcgttcgtggacctggacgccgagctggggctggggggcccgggcgcggcgtttctgtacctggtattcacttaccgccagcgccgggaccaggagctgtgttgtgtgtacgtgatcaagagccagctccccccgcgcgggttggagccggccctggagcggctgtttgggcgcctccggatcaccaacacgattcacggcaccgaggacatgacgcccccggccccaaaccgaaaccccgacttccccctcgcgggcctggccgccaatccccaaaccccgcgttgctcggctggccaggtcacgaacccccagttcgccgacaggctgtaccgctggcagccggaccttcgggggcgccccaccgcacgcacctgtacgtacgccgcctttgcagagctcggcatgatgcccgaggatagtccccgctgcctgcaccgcaccgagcgctttggggcggtcagcgtccccgttgttattctggaaggcgtggtgtggcgccccggcgagtggcgggcatgcgcgtgagcgtagcaaacgccccgcccacacaacgctccgcccccaaccccttccccgctgtcactcgtggttcgttgacccggacgtccgccaaataaagccactgaaacccgaaacgcgagtgttgtaacgtcctttgggcgggaggaagccacaaaatgcaaatgggatacatggaaggaacacacccccgtgactcaggacatcggcgtgtccttttgggtttcactgaaactggcccgcgccccacccctgcgcgatgtggataaaaagccagcgcgggtggtttagggtaccacaggtgggtgctttggaaacttgtcggtcgccgtgctcctgtgagcttgcgtccctccccggtttcctttgcgctcccgccttccggacctgctctcgcctatcttctttggctgtcggtgcgattcgtcaggcagcggccttgtcgaatctcgaccccaccactcgccggacccgccgacgtcccctctggagcccgccgaaacccgccgcgtctgttgaaatggccagccgcccagccgcatcctctcccgtcgaagcgcgggccccggttgggggacaggaggccggcggccccagcgcagccacccagggggaggccgccggggcccctctcgcccacggccaccacgtgtactgccagcgagtcaatggcgtgatggtgctttccgacaagacgcccgggtccgcgtcctaccgcatcagcgatagcaactttgtccaatgtggttccaactgcaccatgattatcgacggagacgtggtgcgcgggcgcccccaggacccgggggccgcggcatcccccgctcccttcgttgcggtgacaaacatcggagccggcagcgacggcgggaccgccgtcgttgcattcgggggaaccccacgtcgctcggcggggacgtctaccggtacccagacggccgacgtcccagccgaggcccttgggggcccccctcctcctccccgcttcaccctgggtggcggctgttgctcctgtcgcgacacacggcgccgctctgcggtattcgggggggagggggatcccgtcggccccgcggagttcgtctcggacgaccggtcgtccgattccgactcggatgactcggaggacaccgactcggagacgctgtcacacgcctcctcggacgtgtccggcggggccacgtacgacgacgcccttgactccgattcgtcatcggatgactccctgcagatagatggccccgtgtgtcgcccgtggagcaatgacaccgcgcccctggatgtttgccccgggacccccggcccgggcgccgacgccggtggtccctcagcggtagacccacacgcgccgacgacaggggccggcgctggtcttgcggccgatcccgccgtggcccgggacgacgcggaggggctttcggacccccggccacgtctgggaacgggcacggcctaccccgtccccctggaactcacgcccgagaacgcggaggccgtggcgcgctttctgggagatgccgtgaaccgcgaacccgcgctcatgctggagtacttttgccggtgcgcccgcgaggaaaccaagcgtgtcccccccaggacattctgcagcccccctcgcctcacggaggacgactttgggcttctcaactacgcgctcgtggagatgcagcgcctgtgtctggacgttcctccggtcccgccgaacgcatacatgccctattatctcagggagtatgtgacgcggctggtcaacgggttcaagccgctggtgagccggtccgctcgcctttaccgcatcctgggggttctggtgcacctgcggatccggacccgggaggcctcctttgaggagtggctgcgatccaaggaagtggccctggactttggcctgacggaaaggcttcgcgagcacgaagcccagctggtgatcctggcccaggctctggaccattacgactgtctgatccacagcacaccgcacacgctggtcgagcgggggctgcaatcggccctgaagtatgaggagttttacctaaagcgctttggcgggcactacatggagtccgtcttccagatgtacacccgcatcgccggctttttggcctgccgggccacgcgcggcatgcgccacatcgccctggggcgagaggggtcgtggtgggaaatgttcaagttctttttccaccgcctctacgaccaccagatcgtaccgtcgacccccgccatgctgaacctggggacccgcaactactacacctccagctgctacctggtaaacccccaggccaccacaaacaaggcgaccctgcgggccatcaccagcaacgtcagtgccatcctcgcccgcaacgggggcatcgggctatgcgtgcaggcgtttaacgactccggccccgggaccgccagcgtcatgcccgccctcaaggtcctcgactcgctggtggcggcgcacaacaaagagagcgcgcgtccgaccggcgcgtgcgtgtacctggagccgtggcacaccgacgtgcgggccgtgctccggatgaagggggtcctcgccggcgaagaggcccagcgctgcgacaatatcttcagcgccctctggatgccagacctgtttttcaagcgcctgattcgccacctggacggcgagaagaacgtcacatggaccctgttcgaccgggacaccagcatgtcgctcgccgactttcacggggaggagttcgagaagctctaccagcacctcgaggtcatggggttcggcgagcagatacccatccaggagctggcctatggcattgtgcgcagtgcggccacgaccgggagccccttcgtcatgttcaaagacgcggtgaaccgccactacatctacgacacccagggggcggccatcgccggctccaacctctgcaccgagatcgtccatccggcctccaagcgatccagtggggtctgcaatctgggaagcgtgaatctggcccgatgcgtctccaggcagacgtttgactttgggcggctccgcgacgccgtgcaggcgtgcgtgctgatggtgaacatcatgatcgacagcacgctacaacccacgccccagtgcacccgcggcaacgacaacctgcggtccatgggaatcggcatgcagggcctgcacacggcctgcctgaagctggggctggatctggagtctgccgaatttcaggacctgaacaaacacatcgccgaggtgatgctgctgtcggcgatgaagaccagcaacgcgctgtgcgttcgcggggcccgtcccttcaaccactttaagcgcagcatgtatcgcgccggccgctttcactgggagcgctttccggacgcccggccgcggtacgagggcgagtgggagatgctacgccagagcatgatgaaacacggcctgcgcaacagccagtttgtcgcgctgatgcccaccgccgcctcggcgcagatctcggacgtcagcgagggctttgcccccctgttcaccaacctgtttagcaaggtgacccgggacggcgagacgctgcgccccaacacgctcctgctaaaggaactggaacgcacgtttagcgggaagcgcctcctggaggtgatggacagtctcgacgccaagcagtggtccgtggcgcaggcgctcccgtgcctggagcccacccaccccctccggcgattcaagaccgcgtttgactacgaccagaagttgctgatcgacctgtgtgcggaccgcgccccctacgtcgaccatagccaatccatgaccctgtatgtcacggagaaggcggacgggaccctcccagcctccaccctggtccgccttctggtccacgcatataagcgcggactaaaaacagggatgtactactgcaaggttcgcaaggcgaccaacagcggggtctttggcggcgacgacaacattgtctgcacgagctgcgcgctgtgaccgacaaaccccctccgcgccaggcccgccgccactgtcgtcgccgtcccacgcgctcccccgctgccatggattccgcggccccagccctctcccccgctctgacggcccatacgggccagagcgcgccggcggacctggcgatccagattccaaagtgccccgaccccgagaggtacttctacacctcccagtgtcccgacattaaccacctgcgctccctcagcatccttaaccgctggctggaaaccgagcttgttttcgtgggggacgaggaggacgtctccaagctttccgagggcgagctcagcttttaccgcttcctcttcgctttcctgtcggccgccgacgacctggttacggaaaacctgggcggcctctccggcctgtttgagcagaaggacattctccactactacgtggagcaggaatgcatcgaagtcgtacactcgcgcgtgtacaacatcatccagctggtgctttttcacaacaacgaccaggcgcgccgcgagtacgtggccggcaccatcaaccacccggccatccgcgccaaggtggactggttggaagcgcgggtgcgggaatgcgcctccgttccggaaaagttcattctcatgatcctcatcgagggcatcttttttgccgcctcgtttgccgccatcgcctaccttcgcaccaacaaccttctgcgggtcacctgccagtcaaacgacctcatcagccgggacgaggccgtgcacacgacggcctcgtgttacatctacaacaactacctcggcgggcacgccaagcccccgcccgaccgcgtgtacgggctgttccgccaggcggtcgagatcgagatcggatttatccgatcccaggcgccgacggacagccatatcctgagcccggcggcgctggcggccatcgaaaactacgtgcgattcagcgcggatcgcctgttgggccttatccacatgaagccactgttttccgccccaccccccgacgccagctttccgctgagcctcatgtccaccgacaaacacaccaattttttcgagtgtcgcagcacctcctacgccggggcggtcgtcaacgatctgtgagggtcgcggcgcgcttctacccgtgtttgcccataataaacctctgaaccaaactttgggtctcattgtgattcttgtcagggacgcgggggtgggagaggataaaaggcggcgcaaaaagcagtaaccaggtccggccagattctgagggcataggataccataattttattggtgggtcgtttgttcggggacaagcgcgctcgtctgacgtttgggctactcgtcccagaatttggccaggacgtccttgtagaacgcgggtgggggggcctgggtccgcagctgctccagaaacctgtcggcgatatcaggggccgtgatatgccgggtcacgatagatcgcgccaggttttcgtcgcggatgtcctggtagataggcaggcgtttcagaagagtccacggcccccgctccttggggccgataagcgatatgacgtacttaatgtagcggtgttccaccagctcggtgatggtcatgggatcggggagccagtccagggactctggggcgtcgtggatgacgtggcgtcgccggctggccacataactgcggtgctcttccagcagctgcgcgttcgggacctggacgagctcgggcggggtgagtatctccgaggaggacgacctggggccggggtggcccccggtaacgtcccggggatccagggggaggtcctcgtcgtcttcgtatccgccggcgatctgttgggttagaatttcggtccacgagacgcgcgtctcggtgccgccggtggccggcggcagagggggcctggtttccgtggagcgcgagctggtgtgttcccggcggatggcccgccgggtctgagagcgactcgggggggtccagtgacattcgcgcagcacatcctccacggaggcgtaggtgttattgggatggaggtcggtgtggcagcggacaaagagggccaggaactgggggtagctcatcttaaagtacttcagtatatcgcgacagttgatcgtgggaatgtagcaggcgctaatatccaacacaatatcgcagcccatcaacaggaggtcagtgtccgtggtgtacacgtacgcgaccgtgttggtgtgatagaggttggcgcaggcatcgtccgcctccagctgacccgagttaatgtaggcgtaccccagggcccggagaacgcgaatacagaacagatgcgccagacgcagggccggcttcgagggcgcggcggacggcagcgcggctccggacccggccgtcccccgggtccccgaggccagagaggtgccgcgtcggcgcatgttggaaaaggcagagctgggtctggagtcggtgatgggggaaggcggtggagaggcgtccacgtcactggcctcctcgtccgtccggcactgggccgtcgtgcgggccaggatggccttggctccaaacacaaccggctccatacaattgaccccgcgatcggtaacgaagatggggaaaagggacttttgggtaaacacctttaataagcgacagaggcagtgtagcgtaatggcctcgcggtcgtaactggggtatcggcgctgatatttgaccaccaacgtgtacatgacgttccacaggtccacggcaatgggggtgaagtacccggccggggccccaaggccccggcgcttgaccagatggtgtgtgtgggcaaacttcatcatcccgaacaaacccatgtcaggtcgattgtaactgcggatcggcctaactaaggcgtggttggtgcgacggtccgggacacccgagcctgtctctctgtgtatggtgacccagacaacaacaccgacacaagaggacaataatccgttaggggacgctctttataatttcgatggcccaactccacgcggattggtgcagcaccctgcatgcgccggtgcgggccaaccttccccccgctcattgcctcttccaaaagggtgtggcctaacgagctgggggcgtatttaatcaggctagcgcggcgggcctgccgtagtttctggctcggtgagcgacggtccggttgcttgggtcccctggctgccatcaaaaccccaccctcgcagcggcatacgccccctccgcgtcccgcacccgagaccccggcccggctgccctcaccaccgaagcccacctcgtcactgtggggtgttcccagcccgcgttgggatgacggattcccctggcggtgtggcccccgcctcccacgtggaggacgcgtcggacgcgtccctcgggcagccggaggagggggcgccctgccaggtggtcctgcagggcgccgagcttaatggaatcctacaggcgtttgccccgctgcgcacgagccttctggactcgcttctggttatgggagaccggggcatccttatccataacacgatctttggggagcaggtgttcctgcccctggaacactcgcaattcagtcggtatcgctggcgcggacccacggcggcgttcctgtctctcgtggaccagaagcgctccctcctgagcgtgtttcgcgccaaccagtacccggacctacgtcgggtggagttggcgatcacgggccaggccccgtttcgcacgctggttcagcgcatatggacgacgacgtccgacggcgaggccgttgagctagccagcgagacgctgatgaagcgcgaactgacgagctttgtggtgctggttccccagggaacccccgacgttcagttgcgcctgacgaggccgcagctcaccaaggtccttaacgcgaccggggccgatagtgccacgcccaccacgttcgagctcggggttaacggcaaattttccgtgttcaccacgagtacctgcgtcacatttgctgcccgcgaggagggcgtgtcgtccagcaccagcacccaggtccagatcctgtccaacgcgctcaccaaggcgggccaggcggccgccaacgccaagacggtgtacggggaaaatacccatcgtaccttctctgtggtcgtcgacgattgcagcatgcgggcggtgctccggcgactgcaggtcgccgggggcaccctcaagttcttcctcacgacccccgtccccagtctgtgcgtcaccgccaccggtcccaacgcggtatcggcggtatttctcctgaaaccccagaagatttgcctggactggctgggtcatagccaggggtctccttccgccgggagctcggcctcccgggcctctgggagcgagccaacagacagccaggactccgcgtcggacgcggtcagccacggcgatccggaagacctcgatggcgctgcccgggcgggagaggcgggggcctcgtacgcctgtccgatgccgtcgtcgaccacgcgggtcactcccacgaccaagcgggggcgctcggggggcgaggatgcgcacgcggacacggccctaaagaaacctaagacggggtcgcccaccgcacccccgcccgcagatccagtccccctggacacggaggacgactccgatgcggcggacgggacggcggcccgtcccgccgctccagacgcccgaagcggaagccgttacgcgtgttactttcgcgacctcccgaccggagaagcaagccccggcgccttctccgccttccgggggggcccccaaaccccgtctggttttggattcccctgacggggcggggccttagcggccgcccaaccctcgcaacatcccggggttaatgtaaataaacttggtattgcccaacactctcccgcgtgtcgcgtgtggttcatgtgtgtgcctggcgcccccaccctcgggttcgtgtatttcctttccctgtccttataaaagccgtatgtggggcgctgacggaaccaccccgcgtgccatcacggccaaggcgcgggatgctccgcaacgacagccaccgggccgcgtccccggaggacggccagggacgggtcgacgacggacggccacacctcgcgtgcgtgggggccctggcgcgggggttcatgcatatctggcttcaggccgccacgctgggttttgcgggatcggtcgttatgtcgcgcgggccgtacgcgaatgccgcgtctggggcgttcgccgtcgggtgcgccgtgctgggctttatgcgcgcgccccctcccctcgcgcggcccaccgcgcggatatacgcctggctcaaactggcggccggtggagcggcccttgttctgtggagtctcggggagcccggcacgcagccgggggccctggccccgggcccggccacccagtgcctggcgctgggcgccgcctatgcggcgctcctggtgctcgccgatgacgtctatccgctctttctcctcgccccggggcccctgttcgtcggcaccctggggatggtcgtcggcgggctgacgatcggaggcagcgcgcgctactggtggatcggtgggcccgccgcggccgccctggccgcggcggtgttggcgggcccgggggcgaccaccgccagggactgcttctccagggcgtgccccgaccaccgccgcgtctgcgtcatcgtcgcaggcgagtctgtttcccgccgccccccggaggacccagagcgacccggggacccagggccaccgtcccccccgacaccccaacgatcccaggggccgccggccgatgaggtcgcaccggccggggtagcgcggcccgaaaacgtctgggtgcccgtggtcacctttctgggggctggcgcgctcgccgtcaagacggtgcgagaacatgcccggggaacgccgggcccgggcctgccgctgtggccccaggtgtttctcggaggccatgtggcggtggccctgacggagctgtgtcaggcgcttgcgccctgggaccttacggacccgctgctgtttgttcacgccggactgcaggtcatcaacctcgggttggtgtttcggttttccgaggttgtcgtgtatgcggcgctagggggtgccgtgtggatttcgttggcgcaggtgctggggctccggcgtcgcctgcacaggaaggaccccggggacggggcccggttggcggcgacgcttcggggcctcttcttctccgtgtacgcgctggggtttggggtgggggcgctgctgtgccctccggggtcaacgggcgggcggtcgggcgattgatatatttttcaataaaaggcattagtcccgaagaccgccggtgtgtgatgatttcgccataacacccaaaccccggatggggcccgggtataaattccggaaggggacacgggctaccttcactaccgagggcgcttggtcgggaggccgcatcgaacgcacacccccatccggtggtccgtgtggaggtcgtttttcagtgcccggtctcgctttgccgggaacgctagccgatccctcgcgagggggaggcgtcgggcatggccccggggcgggtgggccttgccgtggtcctgtggagcctggtgtggctcggggcgggggtgtccgggggctcggaaactgcctccaccgggcccacgatcaccgcgggagcggtgacgaacgcgagcgaggcccccacatcggggtcccccgggtcagccgccagcccggaggtcacccccacatcgaccccaaaccccaacaatgtcacacaaaaccaaaccacccccaccgagccggccagccccccaacaacccccaagcccacctccacacccaaaagcccccccacgtccacccccgaccccaaacccaagaacaacaccacccccgccaagtcggaccgccccactaaaccccccgggcccgtgtggtgcgaccgccgcgatttattggcccggtacggctcgcgggtgcagatccgatgccggtttcggaattccacccgcatggagttccgcctccagatatggcgttactccatgggtccgtcccccccaatcgctccggctcccgacctagaggaggtcctgacgaacatcaccgccccacccgggggactcctggtgtacgacagcgcccccaacctaacggacccccacgtgctctgggcggagggggccggcccgggcgccgaccctccgttgtattctgtcaccgggccgctgccgacccagcggctgattatcggcgaggtgacgcccgcgacccagggaatgtattacttggcctggggccggatggacagcccgcacgagtacgggacgtgggtgcgcgtccgcatgttccgccccccgtctctgaccctccagccccacgcggtgatggagggtcagccgttcaaggcgacgtgcacggccgccgcctactacccgcgtaaccccgtggagtttgtctggttcgaggacgaccaccaggtgtttaacccgggccagatcgacacgcagacgcacgagcaccccgacgggttcaccacagtctctaccgtgacctccgaggctgtcggcggccaggtccccccgcggaccttcacctgccagatgacgtggcaccgcgactccgtgacgttctcgcgacgcaatgccaccgggctggccctggtgctgccgcggccaaccatcaccatggaatttggggtccggcatgtggtctgcacggccggctgcgtccccgagggcgtgacgtttgcctggttcctgggggacgacccctcaccggcggctaagtcggccgttacggcccaggagtcgtgcgaccgccccgggctggctacggtccggtccaccctgcccatttcgtacgactacagcgagtacatctgtcggttgaccggatatccggccgggattcccgttctagagcaccacggcagtcaccagcccccacccagggaccccaccgagcggcaggtgatcgaggcgatcgagtgggtggggattggaatcggggttctcgcggcgggggtcctggtcgtaacggcaatcgtgtacgtcgtccgcacatcacagtcgcggcagcgtcatcggcggtaacgcgagacccccccgttacctttttaatatctatatagtttggtccccctctatcccgcccaccgctgggcgctataaagccgccaccctctcttccctcaggtcatccttggtcgatcccgaacgacacacggcgtggagcaaaacgcctccccctgagccgctttcctaccagcgcaacggcatgcctctgcgggcatcggaacacgcctaccggcccctgggccccgggacaccccccatgcgggctcggctccccgccgcggcctgggttggcgtcgggaccatcatcgggggagttgtgatcattgccgcgttggtcctcgtgccctcgcgggcctcgtgggcactttccccatgcgacagcggatggcacgagttcaacctcgggtgcatatcctgggatccgacccccatggagcacgagcaggcggtcggcggctgtagcgccccggcgaccctgatcccccgcgcggctgccaaacagctggccgccgtcgcacgcgtccagtcggcaagatcctcgggctactggtgggtgagcggagacggcattcgggcctgcctgcggctcgtcgacggcgtcggcggtattgaccagttttgcgaggagcccgcccttcgcatatgctactatccccgcagtcccgggggctttgttcagtttgtaacttcgacccgcaacgcgctggggctgccgtgaggcgcgtgtactgcggtctgtctcgtctcctcttctccccttccctccccctccgcatcccaggatcacaccggccaacgagggttggggggtccggcacggacccaaaataataaacacacaatcacgtgcgataaaaagaacacgcggtcccctgtggtgtttttggttatttttattaaatctcgtcgtcaaacagggggaaaggggcgtggtctagcgacggcagcacgggtggaggcgttcaccggctccggcgtccttcgcgtttaagcttggtcaggagggcgctcagggcggcgacgttggtcgggccgtcgttggtcagggcgttggctcgatggcgggcgaggacgggcgaggggctcaacggcgggggcgggggcccggtgcggcccgggggggaaaatagggcggatcccccccagtcgtacaggggattttccgcctcaatgtacggggaggccggcgctgcattcgccgtgttcgcgcagacgttttcgtagacccgcatccatggtatttcctcgtagacacgccccccgtcctcgctcacagtctcgtatattgactcgtcgtcctcgtagggggcgtgccgttcgcgggccgaggcggcgtgggtggctttgcggcgggcgtcgtcgtcgtcgtcggccgtcagatacgtggcttccatctggtcgggttctccctccggggcgggtccccacccccgtggccgatcgaggctccccagagacgcgcgccggacgaggagggggcacgtcgccgccggcggtcgcctgtcgggtcccgcgacgttacgggccgggaggcgcgggggcacctcccccatgtgcgtgtaatacgtggccggctgtgcggccgcagcggggggctcggcgaccgggtcgtccgcatccggaagcgggggcgccgcgccgtccgcgcggcgcctccggaaccgccgggtggccgcgggggtcgagtgtaggcgaggtcgggggaggggcgggggctcgttgtcgcgccgcgcccgctgaatcttttcccgacaggtcccaccccccgcgcgatgcccccccgggccgcgggccatgtcgtccgggggaggccccgcggaccacgtcgtccggcgagacgccacgagccgcaggatggactcgtagtggagcgacggcgccccgctgcggagcagatccgcggccagggcggccccgaaccaagccttgatgctcaactccatccgggcccagctgggggcggtcatcgtggggaacaggggggcggtggtccgacagaaacgctcctggctgtccaccgcggcccgcagatactcgttgttcaggctgtcggtggcccagacgccgtacccggtgagggtcgcgttgatgatatactgggcgtggtgatggacgatcgacagaacctccaccgtggatacgacggtatccacggtcccgtacgtaccgccgctccgcttgccggtctgccacaggttggctaggcgcgtcaggtggcccaggacgtcgctgaccgccgccctgagcgccatgcactgcatggagccggtcgtgccgctgggaccccggtccagatggcgcgcgaacgtttccgcgggcgcctccgggctgccgccgagcgggaggaaccggcgattggagggactcagccggtggcatacgtgcttgtctgtcgtccacagcatccaggacgcccaccggtacagcacggagacgtaggccaggagctcgttgagccgcagtgcggtgtcggtgctggggcggcttgggtccgccgggcgcataaagaacatgtactgctgaatccgatggagggcgtcgcgcaggccggccacggtggcggcgtacttggccgccgcggccccgctcttgaacggggtgcgcgccagcagctttggcgccagggtgggccgcagcagcacgtgaaggctggggtcgcagtcgcccacggggtcctcggggacgtccaggccgctgggcaccaccgtctgcaggtacttccagtactgcgtgaggatggcgcggctcaactggccgccggtgagctccacctcgcccagcgcctgggtggcggccgaagcgtagtgccggatgtactcgtagtgcgggtcgctggcgagcccgtccacgatcaaactctcgggaaccgtgttgtgttgccgcgcggccaaccggacgctgcgatcggtgcaggtcagaaacgccggctgcgcgtcgtcggagcgctgccgcaaggcgcccacggccgcgctaaggagcccctccggggtggggagcagacacccgccgaagatgcgccgctcgggaacgcccgcgttgtcgccgcggatcaggttggcaggcgtcaggcaccgcgccagccgcagggagctcgcgccgcgcgtccggcgctgcatggtgacgcccgttcggtcgggacccgccggtcggagttatgccgcgtccagggccatcggggcgctttttatcgggaggagcttatgggcgtggcgggcctcccagcccggtcgcgcgcctccccgacacgtgcgcccgcagggcggcggccccctcgtctcccatcagcagtttcctaaactgggacatgatgtccaccacgcggacccgcgggcccaacacggacccgccgcttacgggggcgggggggaagggctccaggtccttgagaagaaaggcggggtctgccgtcccggacacgggggcccggggcgctgaggaggcggggcgcagatccacgtgctccgcggccgcgcggacgtccgcccagaacttggcgggggtggtgcgcgcgtacaggggctgggtcgctcggaggacgcacgcgtagcgcaggggggtgtacgtgcccacctcgggggccgtgaatcccccgtcaaacgcggccagtgtcacgcacgccaccacggtgtcggcaaagcccagcagccgctgcaggacgagcccggcggccagaatggcgcgcgtggccgccgcgtcgtcccggcgccggtgcgcgtccccgcacgcccgggcgtactttaaggtcacggtcgccagggccgtgtgcagcgcgtacaccgcagcgcccagcacggcgttgagcccgctgttggcgagcagccggcgcgctgcggtgtcgcccagcgcctcgtgctcggcccccacgaccgcggggcttcccaggggcagggcgcgaaacagctcctcccgcgccacgtccgcaaaggcggggtggtgcacgtgcgggtgcaggcgcgcccccacgaccaccgagagccactggaccgtctgctccgccatcaccgccagcacatccagcacgcgccccaggaaggcggcctcccgcgtcaaaacgcaccggacggcgtcgggattgaagcgggcgagcagggccccggtggccaggtacgtcatgcggccggcatagcgggcggccacgcgacagtcgcggtccagcagcgcgcgcaccccgggccagtacagcagggaccccagcgagctgcgaaacaccgcggcgtcggggccggattggggggacactaacccccccgcgctcagtaacggcacggccgcggccccgacgggacgcaacgccgtgaggctcgcgaactgccgcctcagctcggcagccctgtcgtccaggtccgacccgcgcgcctctgcgtgaaggcgcgtcccgcacacccacccgttgatggccagccgcacgacggcatccgccaaaaagctcatcgcctgggcggggctggtttttgttcgacgatccgtcaggtcaagaatcccatcgcccgtgatataccaggccaacgcctcgccctgctgcagggtttggcggaaaaacaccgcggggttgtcgggggaggcgaagtgcatgacccccacgcgcgataacccgaacgcgctatccggacacgggtaaaacccggccggatgccccagggctagggcggagcgcacggactcgtcccacacggcaacctgaggggccagtcgatccaacgggaatgccgcccggagctccgggcccggcacgcgtccctccagaacctccaccttgggcggggaacgggccccgccgccgtcctccggcccgacgtcttccgggtagtcgtcctcctcgtactgcagctcctctaggaacagcggcgacggcgccacccgcgaaccgccgacccgccccaaaatagcccgcgcgtcgacgggacccaggtatcccccctgccgggcctgcggaggaccgcggggaacctcatcatcatcgtccaggcgaccgcgcaccgactggctacgggccgcatcgggcccggggcgctgccgggacgctcggcgatgggatgtgggcggggcttccgacgcgcgccgtcgtcgggctcgcgggccttcccgtcgacggcgcacgggcggctcgtcgcccgccatctcctccagagcctctagctcgctgtcgtcatccccgcggaacaccgcacgcaggtaccccatgaaccccaccccatcgcccgctggctcgtccgccacgggcgaggcgcgggggcgggtggatgcgcgcctcctacgccccgcgggttcgcgagccgacatggtggcgatagacgcgggttatcggatgtccgctaccccccaaaaaagaaaaagaccccacagcgcggatggaggccggggtaggtgccgccggaccccctcgcgatgggaatggacgggagcgacggggccggcgcaaaaaacgcagtatctcccgcgaaggctacccgccgccccagcccccggccaaatgcggaaacggtcccgcgctctcgcctttatacgcgggccgccctgcgacacaatcacccgtccgtggtttcgaatctacacgacaggcccgcagacgcggctaacacacacgccggcaacccagaccccagtgggttggttgcgcggtcccgtctcctggctagttcttttccccaccaccaaataatcagacgacaaccgcaggtttttgtaatgtatgtgctcgtgtttattgtggatacgaaccggggacgggaggggaaaacccagacgggggatgcgggtccggtcgcgccccctacccaccgtactcgtcaattccaagggcatcggtaaacatctgctcaaactcgaagtcggccatatccagagcgccgtagggggcggagtcgtggggggtaaatcccggacccggggaatccccgtcccccaacatgtccagatcgaaatcgtctagcgcgtcggcatgcgccatcgccacgtcctcgccgtctaagtggagctcgtcccccaggctgacatcggtcgggggggccgtcgacagtctgcgcgtgtgtcccgcggggagaaaggacaggcgcggagccgccagccccgcctcttcgggggcgtcgtcgtccgggagatcgagcaggccctcgatggtagacccgtaattgtttttcgtacgcgcgcggctgtacgcgtgttcccgcatgaccgcctcggagggcgaggtcgtgaagctggaatacgagtccaacttcgcccgaatcaacaccataaagtacccagaggcgcgggcctggttgccatgcagggtgggaggggtcgtcaacggcgcccctggctcctccgtagccgcgctgcgcaccagcgggaggttaaggtgctcgcgaatgtggtttagctcccgcagccggcgggcctcgattggcactccccggacggtgagcgctccgttgacgaacatgaagggctggaacagacccgccaactgacgccagctctccaggtcgcaacagaggcagtcaaacaggtcgggccgcatcatctgctcggcgtacgcggcccataggatctcgcgggtcaaaaatagatacaaatgcaaaaacagaacacgcgccagacgagcggtctctcggtagtacctgtccgtgatcgtggcgcgcagcatttctcccaggtcgcgatcgcgtccgcgcatgtgcgcctggcggtgcagctgccggacgctggcgcgcaggtaccggtacagggccgagcagaagttggccaacacggttcgatagctctcctcccgcgcccgtagctcggcgtggaagaaacgagagagcgcttcgtagtagagcccgaggccgtcgcgggtggccggaagcgtcgggaaggccacgtcgccgtgggcgcgaatgtcgatttgggcgcgttcggggacgtacgcgtccccccattccaccacatcgctgggcagcgttgataggaatttacactcccggtacaggtcggcgttggtcggtaacgccgaaaacaaatcctcgttccaggtatcgagcatggtacatagcgcggggcccgcgctaaagcccaagtcgtcgaggagacggttaaagagggcggcgggggggacgggcatgggcggggagggcatgagctgggcctggctcaggcgccccgttgcgtacagcggaggggccgccggggtgtttttgggacccccggccgggcgggggggtggtggcgaagcgccgtccgcgtccatgtcggcaaacagctcgtcgaccaagaggtccattgggtggggttgatacgggaaagacgatatcgggcttttgatgcgatcgtccccgcccgcccagagagtgtgggacgcccgacggcgcgggaagagaaaaacccccaaacgcgttagaggaccggacggaccttatggggggaagtgggcagcgggaaccccgtccgttcccgaggaatgacagcccgtggtcgccaccccgcatttaagcaacccgcacgggccgccccgtacctcgtgacttccccccacattggctcctgtcacgtgaaggcgaaccgagggcggctgtccaacccaccccccgccacccagtcacggtccccgtcggattgggaaacaaaggcacgcaacgccaacaccgaatgaacccctgttggtgctttattgtctgggtacggaagtttttcactcgacgggccgtctggggcgagaagcggagcgggctggggctcgaggtcgctcggtggggcgcgacgccgcagaacgccctcgagtcgccgtggccgcgtcgacgtcctgcaccacgtctggattcaccaactcgttggcgcgctgaagcaggtttttgccctcgcagaccgtcacgcggatggtggtgatgccaaggagttcgttgaggtcttcgtctgtgcgcggacgcgacatgtcccagagctggaccgccgccatccgggcatgcatggccgccaggcgcccgaccgcggcgcagaagacgcgcttgttaaagccggccacccggggggtccatggcgcgtcggggtttgggggggcggtgctaaagtgcagctttctggccagcccctgcgcgggtgtcttggatcgggttggcgccgtcgacgcgggggcgtctgggagtgcggcggattctggctgggccgatttcctgccgcgggtggtctccgccgccggggccgcgggggccttagtcgccacccgctgggttcggggggcccggggggcggtggtgggtgtgcgtccggcccctccggacccagcgggcggcggaggcgcccgcgcaggccccgggccggacaaaaccgccccggaaacgggacgccgcgtccgggggacctccgggtgttcgtcgtcttcggatgacgagcccccgtagagggcataatccgactcgtcgtactggacgaaacggacctcgcccctcgggcgcgcgcgtgtctgtagggcgccacggcgggaggtggcaggcggactatcgggactcgccatacatgaagacggggtgtagtacagatcctcgtactcatcgcgcggaacctcccgcggacccgacttcacggagcggcgagaggtcatggttccacgaacacgctagggtcggatgcgcggacaattaggcctgggttcggacggcggggggtggtgcaggtgtggagaggtcgagcgataggggcggcccgggagagaagagagggtccgcaaaacccactggggatgcgtgagtggccctctgtgggcggtgggggagagtcttataggaagtgcatataaccacaacccatgggtctaaccaatccccaggggccaagaaacagacacgccccaaacggtctcggtttccgcgaagaaggggaagtcctgggacaccctccacccccacccctcaccccacacagggcgggttcaggcgtgcccggcagccagtagcctctggcagatctgacagacgtgtgcgataatacacacgcccatcgaggccatgcctacataaaagggcaccagggcccccggggcagacatttggccagcgttttgggtctcgcaccgcgcgcccccgatcccatcgcgcccgccctcctcgccgggcggctccccgtgcgggcccgcgtctcccgccgctaaggcgacgagcaagacaaacaacaggcccgcccgacagacccttctgggggggcccatcgtccctaacaggaagatgagtcagtggggatccggggcgatccttgtccagccggacagcttgggtcgggggtacgatggcgactggcacacggccgtcgctactcgcgggggcggagtcgtgcaactgaacctggtcaacaggcgcgcggtggcttttatgccgaaggtcagcggggactccggatgggccgtcgggcgcgtctctctggacctgcgaatggctatgccggctgacttttgtgcgattattcacgcccccgcgctatccagcccagggcaccacgtaatactgggtcttatcgactcggggtaccgcggaaccgttatggccgtggtcgtagcgcctaaaaggacgcgggaatttgcccccgggaccctgcgggtcgacgtgacgttcctggacatcctggcgccccccccggccctcaccaagccgatttccctgcggcagttcccgcaactggcgcccccccctccaaccggggccgggatacgcgcagatccttggttggagggggcgctcggggacccaagcgtgactccggccctaccggcgcgacgccgagggcggtccctcgtctatgccggcgagctgacgccggttcagacggaacacggggacggcgtacgagaagccatcgccttccttccaaaacgcgaggaggatgccggtttcgacattgtcgtccgtcgcccggtcaccgtcccggcaaacggcaccacggtcgtgcagccatccctccgcatgctccacgcggacgccgggcccgcggcctgttatgtgttggggcggtcgtcgctcaacgcccgcggcctcctggtcgttcctacgcgctggctccccgggcacgtatgtgcgtttgttgtttacaaccttacgggggttcctgtgaccctcgaggccggcgccaaggtcgcccagctcctggttgcgggggcggacgctcttccttggatccccccggacaactttcacgggaccaaagcgcttcgaaactaccccaggggtgttccggactcaaccgccgaacccaggaacccgccgctcttggtgtttacgaacgagtttgacgcggaggcccccccgagcgagcgcgggaccgggggttttggctctaccggtatttagcccatagcttggggttcgttccgggcaataaaaaacgtttgtatctcatctttcctgtgtgtagttgtttctgttggaggcctgtgggtctatcacacccgcccctccatcccacaaacacagaacacacgggttggatgaaaacacgcatttattgacccaaaacacacggagctgctcgagatgggccagggcgaggtgcggttggggaggctgtaggtctgggaacggacacgcggggacacgattccggtttggggtccgggagggcgtcgccgtttcgggcggcaggcgccagcgtaacctccgggggcggcgtgtgggggtgccccaaggagggcgcctcggtcaccccaagcccccccaagcgggttcccccggcaaccccgaaggcggagaggccaagggcccgttcggcgatggccacatcctccatgaccacgtcgctctcggccatgctccgaatagcctgggagacgagcacatccgcggacttgtcagccgcccccacggacatgtacatctgcaggatggtggccatacacgtgtccgccaggcgccgcatcttgtcctgatgggccgccacggccccgtcgatcgtgggggcctcgagcccggggtggtggcgcgccagtcgttctaggttcaccatgcaggcgtggtacgtgcgggccaaggcgcgggccttcacgaggcgtcgggtgtcgtccagggaccccagggcgtcatcgagcgtgatgggggcgggaagtagcgcgttaacgaccaccagggcctcctgcagccgcggctccgcctccgagggcggaacggccgcgcggatcatctcatattgttcctcggggcgcgctccccagccacatatagccccgagaagagaagccatcgcgggcgggtactggcccttgggcgcgcggacgcaatggggcaggaagacgggaaccgcggggagaggcgggcggccgggactcccgtggaggtgaccgcgctttatgctaccgacgggtgcgttattacctcttcgatcgccctcctcacaaactctctactgggggccgagccggtttatatattcagctacgacgcatacacgcacgatggccgtgccgacgggcccacggagcaagacaggttcgaagagagtcgggcgctctaccaagcgtcgggcgggctaaatggcgactccttccgagtaaccttttgtttattggggacggaagtgggtgggacccaccaggcccgcgggcgaacccgacccatgttcgtctgtcgcttcgagcgagcggacgacgtcgccgcgctacaggacgccctggcgcacgggaccccgctacaaccggaccacatcgccgccaccctggacgcggaggccacgttcgcgctgcatgcgaacatgatcctggctctcaccgtggccatcaacaacgccagcccccgcaccggacgcgacgccgccgcggcgcagtatgatcagggcgcgtccctacgctcgctcgtggggcgcacgtccctgggacaacgcggccttaccacgctatacgtccaccacgaggcgcgcgtgctggccgcgtaccgcagggcgtattatggaagcgcgcagagtcccttctggtttcttagcaaattcgggccggacgaaaaaagcctggtgctcaccactcggtactacctgcttcaggcccagcgtctggggggcgcgggggccacgtacgacctgcaggccatcaaggacatctgcgccacctacgcgattccccacgccccccgccccgacaccgtcagcgccgcgtccctgacctcgtttgccgccatcacgcggttctgttgcacgagccagtacgcccgcggggccgcggcggccgggtttccgctttacgtggagcgccgtattgcggccgacgtccgcgagaccagtgcgctggagaagttcataacccacgatcgcagttgcctgcgcgtgtccgaccgtgaattcattacgtacatttacctggcccattttgagtgtttcagccccccgcgcctagccacgcatcttcgggccgtgacgacccacgaccccaaccccgcggccaacacggagcagccctcgcccctgggcagggaggccgtggaacaatttttttgccacgtgcgcgcccaactgaatatcggggagtacgtcaaacacaacgtgaccccccgggagaccgtcctggatggcgatacggccaaggcctacctgcgcgctcgcacgtacgcgcccggggccctgacgcccgcccccgcgtattgcggggccgtggactccgccaccaaaatgatggggcgtttggcggacgccgaaaagctcctggtcccccgcgggtggcccgcgtttgcgcccgccagtcccggggaggatacggcgggcggcacgccgcccccacagacctgcggaatcgtcaagcgcctcctgagactggccgccacggaacaacaggacaccacgcccccggcgatcgcggcgcttatccgtaatgcggcggtgcagactcccctgcccgtctaccggatatccatggtccccacgggacaggcatttgccgcgctggcctgggacgactgggcccgcataacgcgggacgctcgcctggccgaagcggtcgtgtccgccgaagcggcggcgcaccccgaccacggcgcgctgggcaggcggctcacggatcgcatccgcgcccagggccccgtgatgccccctggcggcctggatgccggggggcagatgtacgtgaatcgcaacgagatattcaacggcgcgctggcaatcacaaacatcatcctggatctcgacatcgccctgaaggagcccgtcccctttcgccggctccacgaggccctgggccactttaggcgcggggctctggctgcggttcagctcctgtttcccgcggcccgcgtggaccccgacgcatatccctgttattttttcaaaagcgcatgtcggcccggcccggcgtccgtgggttccggcagcggactcggcgacgacggggactggtttccctgctacgacgacgccggtgatgaggagtgggcggaggacccgggcgccatggacacatcccacgatcccccggacgacgaggttgcctactttgacctgtgccacgaagtcggccccacggcggaacctcgcgaaacggattcgcccgtgtgttcctgcaccgacaagatcggactgcgggtgtgcatgcccgtccccgccccgtacgtcgtccacggttctctaacgatgcggggggtggcacgggtcatccagcaggcggtgctgttggaccgagattttgtggaggccatcgggagctacgtaaaaaacttcctgttgatcgatacgggggtgtacgcccacggccacagcctgcgcttgccgtattttgccaaaatcgcccccgacgggcctgcgtgcggaaggctgctgccagtgtttgtgatcccccccgcctgcaaagacgttccggcgtttgtcgccgcgcacgccgacccgcggcgcttccattttcacgccccgcccacctatctcgcttccccccgggagatccgtgtcctgcacagcctgggtggggactatgtgagcttctttgaaaggaaggcgtcccgcaacgcgctggaacactttgggcgacgcgagaccctgacggaggtcctgggtcggtacaacgtacagccggatgcgggggggaccgtcgaggggttcgcatcggaactgctggggcggatagtcgcgtgcatcgaaacccactttcccgaacacgccggcgaatatcaggccgtatccgtccggcgggccgtcagtaaggacgactgggtcctcctacagctagtccccgttcgcggtaccctgcagcaaagcctgtcgtgtctgcgctttaagcacggccgggcgagtcgcgccacggcgcggacattcgtcgcgctgagcgtcggggccaacaaccgcctgtgcgtgtccttgtgtcagcagtgctttgccgccaaatgcgacagcaaccgcctgcacacgctgtttaccattgacgccggtacgccatgctcgccgtccgttccctgcagcacctctcaaccgtcgtcttgataacggcgtacggcctcgtgctcgtgtggtacaccgtcttcggtgccagtccgctgcaccgatgtatttacgcggtacgccccaccggcaccaacaacgacaccgccctcgtgtggatgaaaatgaaccagaccctattgtttctgggggccccgacgcacccccccaacgggggctggcgcaaccacgcccatatctgctacgccaatcttatcgcgggtagggtcgtgcccttccaggtcccacccgacgccatgaatcgtcggatcatgaacgtccacgaggcagttaactgtctggagaccctatggtacacacgggtgcgtctggtggtcgtagggtggttcctgtatctggcgttcgtcgccctccaccaacgccgatgtatgtttggtgtcgtgagtcccgcccacaagatggtggccccggccacctacctcttgaactacgcaggccgcatcgtatcgagcgtgttcctgcagtacccctacacgaaaattacccgcctgctctgcgagctgtcggtccagcggcaaaacctggttcagttgtttgagacggacccggtcaccttcttgtaccaccgccccgccatcggggtcatcgtaggctgcgagttgatgctacgctttgtggccgtgggtctcatcgtcggcaccgctttcatatcccggggggcatgtgcaatcacataccccctgtttctgaccatcaccacctggtgttttgtctccaccatcggcctgacagagctgtattgtattctgcggcggggcccggcccccaagaacgcagacaaggccgccgccccggggcgatccaaggggctgtcgggcgtctgcgggcgctgctgttccatcatcctctcgggcatcgcagtgcgattgtgttatatcgccgtggtggccggggtggtgctcgtggcgcttcactacgagcaggagatccagaggcgcctgtttgatgtatgacgtcacatccaggccggcggaaaccggaacggcatatgcaaattggaaactgtcctgtcttggggcccacccacccgacgcgtcatatgcaaatgaaaatcggtcccccgaggccacgtgtagcctggatcccaacgaccccgcccatgggtcccaattggccgtcccgttaccaagaccaacccagccagcatatccacccccgcccgggtccccgcggaagcggaacggtgtatgtgatatgctaattaaatacatgccacgtacttatggtgtctgattggtccttgtctgtgccggaggtggggcgggggccccgcccggggggcggaacgaggaggggtttgggagagccggccccggcaccacgggtataaggacatccaccacccggccggtggtggtgtgcagccgtgttccaaccacggtcacgcttcggtgcctctccccgattcgggcccggtcgctcgctaccggtgcgccaccaccagaggccatatccgacaccccagccccgacggcagccgacagcccggtcatggcgactgacattgatatgctaattgacctcggcctggacctctccgacagcgatctggacgaggacccacccgagccggcggagagccgccgcgacgacctggaatcggacagcagcggggagtgttcctcgtcggacgaggacatggaagacccccacggagaggacggaccggagccgatactcgacgccgctcgcccggcggtccgcccgtctcgtccagaagaccccggcgtacccagcacccagacgcctcgtccgacggagcggcagggccccaacgatcctcaaccagcgccccacagtgtgtggtcgcgcctcggggcccggcgaccgtcttgctcccccgagcagcacgggggcaaggtggcccgcctccaacccccaccgaccaaagcccagcctgcccgcggcggacgccgcgggcgtcgcaggggtcggggtcgcggtggtcccggggccgccgatggtttgtcggacccccgccggcgtgcccccagaaccaatcgcaacccggggggaccccgccccggggcggggtggacggacggccccggcgccccccatggcgaggcgtggcgcggaagtgagcagcccgacccacccggaggcccgcggacacggggcgtgcgccaagcaccccccccgctaatgacgctggcgattgcccccccgcccgcggacccccgcgccccggccccggagcgaaaggcgcccgccgccgacaccatcgacgccaccacgcggttggtcctgcgctccatctccgagcgcgcggcggtcgaccgcatcagcgagagctttggccgcagcgcacaggtcatgcacgacccctttggggggcagccgtttcccgccgcgaatagcccctgggccccggtgttggcgggccaaggagggccctttgacgccgagaccagacgggtctcctgggaaaccttggtcgcccacggcccgagcctctatcgcacttttgccggcaatcctcgggccgcatcgaccgccaaggccatgcgcgactgcgtgctgcgccaagaaaatttcatcgaggcgctggcctccgccgacgagacgctggcgtggtgcaagatgtgcatccaccacaacctgccgctgcgcccccaggaccccattatcgggacggccgcggctgtgctggataacctcgccacgcgcctgcggccctttctccagtgctacctgaaggcgcgaggcctgtgcggcctggacgaactgtgttcgcggcggcgtctggcggacattaaggacattgcatccttcgtgtttgtcattctggccaggctcgccaaccgcgtcgagcgtggcgtcgcggagatcgactacgcgacccttggtgtcggggtcggagagaagatgcatttctacctccccggggcctgcatggcgggcctgatcgaaatcctagacacacaccgccaggagtgttcgagtcgtgtctgcgagttgacggccagtcacatcgtcgcccccccgtacgtgcacggcaaatatttttattgcaactccctgttttaggtacaataaaaacaaaacatttcaaacaaatcgccccacgtgttgtccttctttgctcatggccggcggggcgtgggtcacggcagatggcgggggtgggcccggcgtacggcctgggtgggcggagggaactaacccaacgtataaatccgtccccgctccaaggccggtgtcatagtgcccttaggagcttcccgcccgggcgcatccccccttttgcactatgacagcgacccccctcaccaacctgttcttacgggccccggacataacccacgtggcccccccttactgcctcaacgccacctggcaggccgaaacggccatgcacaccagcaaaacggactccgcttgcgtggccgtgcggagttacctggtccgcgcctcctgtgagaccagcggcacaatccactgctttttctttgcggtatacaaggacacccaccacacccctccgctgattaccgagctccgcaactttgcggacctggttaaccacccgccggtcctacgcgaactggaggataagcgcggggtgcggctgcggtgtgcgcggccgtttagcgtcgggacgattaaggacgtctctgggtccggcgcgtcctcggcgggagagtacacgataaacgggatcgtgtaccactgccactgtcggtatccgttctcaaaaacatgctggatgggggcctccgcggccctacagcacctgcgctccatcagctccagcggcatggccgcccgcgcggcagagcatcgacgcgtcaagattaaaattaaggcgtgatctccaacccccccatgaatgtgtgtaaccccccaaaaaaataaacagccgtaacccaatcaaaccaggcgtggtgtgagtttgtggacccaaagccctcagagacaacgcgacaggccagtatggaccgtgatacttttatttattaactcacaggggcgcttaccgccacaggaataccagaataatgaccaccactatcgcgaccaccccaaatacagcatggcgccccaccacgccacaacagccctgtcgccggtatggggcatgatcagacgagccgcgagccgcgcgttgggccctgtacagctcgcgcgaattgaccctaggaggccgccacgcgcccgagttttgcgttcgtcgctggtcgtcgggcgccaaagccccggacggctgttcggtcgaacgaacggccacgacagtggcataggttggggggtggtccgacatagcctcggcgtacgtcgggaggcccgacaagaggtcccttgagatgtcgggtggggccacaagcctggtttccggaagaaacaggggggttgccaataacccgccagggccaaaactccggcgctgcgcacgtcgttcggcgcggcgccgggcgcgccgagcggctcgctgggcggcttggcgtgagcggccccgctccgacgcctcgccctctccggaggaggttggcggaattggcacggacgacaggggcccagcagagtacggtggaggtgggtccgtgggggtgtccagatcaataacgacaaacggcccctcgttcctaccagacaagctatcgtaggggggcgggggatcagcaaacgcgttccccgcgctccatagacccgcgtcgggttgcgccgcctccgaagccatggatgcgccccaaagccacgactcccgcgcgctaggtccttggggtaagggaaaaggccctactccccatccaagccagccaagttaacgggctacgccttcggggatgggactggcaccccggcggattttgttgggctggtacgcgttgcccaaccgagggccgcgtccacgggacgcgccttttataaccccgggggtcattcccaacgatcacatgcaatctaactggctcccctctccccccctctcccctctccccccctctcccctctccccccctctcccctctccccccctctcccctctccccccctctcccctctccccccctctcccctctccccccctctcccctctccccccctctcccctctccccccctctcccctctccccccctctcccctctccccccctgctctttccccgtgacacccgacgctggggggcgtggctgccgggaggggccgcggatgggcggggcctactcggtctcccgcccccgcccccgaaccgccccgccggccttgcccccctttgatcccctgctacccccaacccgtgctcgtggtgcgggttgggtggggggggggagtgtgggcgggggtgtgcgggaggtgtcggtggtggtggtggtggtaggaatggtggtgaggggggggggcgctggttggtcaaaaaagggagggacgggggccggcagaccgacggcgacaacgctccccggcggccgggtcgcggctcttacgagcggcccggcccgcgctcccaccccccgggccgtgtccttgctttccccccgtctccccccccctccttctcctcctcctcctcctcgtttttccaaaccccgcccacccggcccggcccggcccggccaccgccgcccacccacccacctcgggagacccagccccggtcccccgttccccgggggccgttatctccagcgccccgtccggcgcgccgccccccgccgctaaaccccatcccgcccccgggaccccacatataagcccccagccacacgcaagaacagacacgcagaacggctgtgtttatttaaataaaccgatgtcggaataaacaaacacaaacacccgcgacggggggacggagggaggggggtgacgggggacgggaacagccacaaaaaacacccacaaaaaaaaacagccacccccgacacccccccccacccccagtctcttcgccttttcccccccaccccacgcccccactgagcccggtcgatcgacgagcacccccgcccccgcccctgccccggcgacccccggcccgcacgatcccgacaacaataacaaccccaacggaaagcggcggggtgtgggggggggcgaggaacaaccgaggggaacgggggatggaaggacgggaagtggaagtcctgatacccatcctacacccccctgccttccaccctccggccccccgcgagtccacccgccggccggctaccgagaccgaacacggcggccgccgcagccgccgcagccgccgccgacaccgcagagccggcgcgcgcacacacaagcggcagaggcagaaaggcccagagtcattgtttatgtggccgcgggccagcagacggcccgcgacacccccccccccgcccgtgtgggtatccggccccccgccccgcgccggtccattaagggcgcgcgtgcccgcgagatatcaatccgttaagtgctctgcagacaggggcaccgcgcccggaaatccattaggccgcagacgaggaaaataaaattacatcacctacccacgtggtgctgtggcctgtttttgctgcgtcatctgagcctttataaaagcgggggcgcggccgtgccgatcgcgggtggtgcgaaagactttccgggcgcgtccgggtgccgcggctctccgggcccccctgcagccggggcggccaaggggcgtcggcgacatcctccccctaagcgccggccggccgctggtctgttttttgttttccccgtttcgggggtggggggggttgcggtttctgtttctttaacccgtctggggtgtttttcgttccgtcgccggaatgtttcgttcgtctgtcccctcacggggcgaaggccgcgtacggcccgggacgagggggcccccgaccgcggcggtccgggccccgtccgggcccgctcgccggcacgcgacgcgaaaaaggccccccggaggcttttccgggttcccggcccggggcctgagataaacaatcggggttaccgccaacggccggcccccgtggcggcccggcccggggccccggcggacccaaggggccccggcccggggccccacaacggcccggcgcatgcgctgtggtttttttttctcggtgttttgtcgggctccgtcgcctttcctgttctcgcttctccccccccccccttcttcacccccagtaccctcctccctcccttcctcccccgttatcccactcgtcaagggcgccccggtgtggttcaacaaagacgccgcgtttccaggtaggttagacacctgcttctccccaatagaggggggggacccaaacgacagggggcgccccagaggctaaggtcggccacgccactcgcgggtgggctcgtgttacagcacaccagcccgttcttttccccccctcccacccttagtcagactctgttacttacccgtccgaccaccaactgcccccttatctaagggccggctggaagaccgccagggggtcggccggtgtcgctgtaaccccccacgccaatgacccacgtactccaagaaggcatgtgtcccaccccgcctgtgtttttgtgcctggctctctatgcttgggtcttactgccgggggggggggagtgcgggggagggggggtgtggaaggaaatgcacggcgcgtgtgtaccccccctaaagttgttcctaaagcgaggatatggaggagtggcgggtgccgggggaccggggtgatctctggcacgcgggggtgggaagggtcgggggaggggggatggggtaccggcccacctggccgacgcgggtgcgcgtgcctctgcacaccaaccccacgtcccccggcggtctctaagaagcaccgccccccctccttcataccaccgagcatgcctgggtgtgggttggtaaccaacacgcccatcccctcgtctcctgtgattctctggctgcaccgcattcttgttttctaactatgttcctgtttctgtctccccccccacccctccgccccaccccccaacacccacgtctgtggtgtggccgacccccttttgggcgccccgtcccgccccgccacccctcccgtcctttgttgccctatagtgtagttaacccccccccgccctttgtggcggccagaggccaggtcagtccgggcgggcaggcgctcgcggaaacttaacacccacacccaacccactgtggttctggctccatgccagtggcaggatgctttcggggatcggtggtcaggcagcccgggccgcggctctgtggttaacaccagagcctgcccaacatggcacccccactcccacgcacccccactcccacgcacccccactcccacgcacccccactcccacgcacccccactcccacgcacccccactcccacgcacccccactcccacgcacccccactcccacgcacccccactcccacgcacccccgagatccatccaacacagacagggaaaagatacaaaagtaaacctttatttcccaatagacagcaaaaatcccctgagttttttattagggccaacactaaagacccgctggtgtgtggtgcccgtgtctttcacttttcccctccccgacacggattggctggtgtagtgggcgcggccagagaccacccagcgcccgacccccccctccccacaaacacggggggcgtcccttattgttttccctcgtcccgggtcgacgccccctgctccccggaccacgggtgccgagaccgcaggctgcggaagtccagggcgcccactagggtgccctggtcgaacagcatgttccccacgggggtcatccagaggctgttccactccgacgcgggggccgtcgggtactcggggggcatcacgtggttacccgcggtctcggggagcagggtgcggcggctccagccggggaccgcggcccgcagccgggtcgccatgtttcccgtctggtccaccaggaccacgtacgccccgatgttccccgtctccatgtccaggatgggcaggcagtcccccgtgatcgtcttgttcacgtaaggcgacagggcgaccacgctagagacccccgagatgggcaggtagcgcgtgaggccgcccgcgggggcggccccggaagtctccgcgtggcgcgtcttccgggcacacttcctcggcccccgcggcccagaagcagcgcgggggccgagggaggtttcctcttgtctccctcccagggcaccgacggccccgcccgaggaggcggaagcggaggaggacgcggccccggcggcggaagaggcggcccccgcgggagtcggggccgaggaggaagaggcagaggaggaagaggcggaggccgccgaggacgtcaggggggtcccgggcccaccctggccgcgcccccccggccctgagtcggagggggggtgcgtcgccgccctcttggcccctgccggcgcgagggggggacgcgtggactggggggaggggttttcctggcccgacccgcgcctcttcctcggacgcaccgccgcctcctgctcgacagaggcggcggaggggagcgggggggcgccggagggggcggcgccgcgggagggcccgtgtccaccctccacgcccggcccccccgagccgcgcgccaccgtcgcacgcgcccggcacagactctgttcttggttcgcggcctgagccagggacgagtgcgactggggcacacggcgcgcgtccgcgggggccggggcgcgggggccgggccccggaggcggcgctcgcacgcacggggccacggccgcgcgggggcgcgcgggtcccgacgcggccgaggacgcggtgggcccggggcggggggcggagcctggcatgggcgccgcggggggcctgtggggagaggccgggggggagtcgctgatcactatggggtctctgttgtttgcaaggggggcgggtctgttgacaagggggcccgtccggcccctcggccgccccgcctccgcttcaacaaccccaaccccaaccccaacccccccggaggggccagacgccccccgcggcgccgcggctcgcgactggcgggagccgccgccgccgccgctgctgttggtggtggtgttggtgttactgctgccgtgtggcccgatgggcgccgaggggggcgctgtccgagccgcggccggctggggggctgcgtgagacgccccgcccgtcacggggggcgcggcggcgcctctgcgtgggggggcgcggggcgtccggcggggggcgggcggtacgtagtctgctgcaagagacaacggggggcgcgatcaggttacgccccctcccaggccctccctttccgcgcccgccctttcctcgcccccccgcccgcctattcctccctcccccctcctcctcctcctcccccagggtcctcgccgcccccccgcctcaccgtcgtccaggtcgtcgtcatcctcgtccgtggtgggctcagggtgggtgggcgacagggccctcaccgtgtgcccccccagggtcaggtaccgcggggcgaaccgctgattgcccgtccagataaagtccacggccgtgcccgccctgacggcctcctcggcctccatgcgggtctgggggtcgttcacgatcgggatggtgctgaacgacccgctgggcgtcacgcccactatcaggtacaccagcttggcgttgcacagcgggcaggtgttgcgcaattgcatccaggttttcatgcacgggatgcagaagcggtgcatgcacgggaaggtgtcgcagcgcaggtggggcgcgatctcatccgtgcacacggcgcacacgtcgccctcgtcgctccccccgtcctctcgagggggggcgcccccgcaactgccggggtcttcctcgcggggggggctcccccccgagaccgcccccccatccacgccctgcggccccagcagccccgtctcgaacagttccgtgtccgtgctgtccgcctcggaggcggagtcgtcgtcatggtggtcggcgtccccccgcccccccacttcggtctccgcctcagagtcgctgctgtccggcaggtctcggtcgcagggaaacacccagacatccggggcgggctaaggggaaaaaaaggggggcgggtaagaatggggggatttcccgcgtcaatcagcgcccacgagttccccctctccccccccccgcctcacaaagtcctgcccccctgctggcctcggaagaggggggagaaaggggtctgcaaccaaaggtggtctgggtccgtcctttggatcccgacccctcttcttccctcttctcccgccctccagacgcaccggagtcgggggtcccacggcgtcccccaaatatggcgggcggctcctccccacccccctagatgcgtgtgagtaagggggccctgcgtatgagtcagtggggaccacgccccctaacacggcgaccccggtccctgtgtgtttgttgtgggggcgtgtctctgtgtatgagtcagggggtcccacggcgaccccgggccctgcgtctgagtcaaaggggccatgtgtatgtgttggggggtctgtatatataaagtcagggggtcacatggcgacccccaacagggcgaccccggtccctgtatatatagggtcagggggttccgcgccccctaacatggcgcccccggtccctgtatatatagtgtcacggggttccacgccccctaacatggcgcccggctcccgtgtatgagtgggggtcccccaacatggcggccggttccagtgtaagggtcgggggtcccccaacatggcgccccccaatatggcgccccccaatatggcgccccagacatggcgcccggcccctcacctcgcgctgggggcggccctcaggccggcgggtactcgctccggggcggggctccatgggggtcgtatgcggttggagggtcgcggacggagggtccctgggggtcgcaacgtaggcggggcttctgtggtgatgcggagagggggcggcccgagtctgcctggctgctgcgtctcgctccgagtgccgaggtgcaaatgcgaccagactgtcgggccagggctaacttataccccacgcctttcccctccccaaaggggcggcagtgacgattcccccaatggccgcgcgtcccaggggaggcaggcccaccgcggggcggccccgtccccggggaccaacccggcgcccccaaagaatatcattagcatgcacggcccggcccccgatttgggggaccaacccggtgtcccccaaagaaccccattagcatgcccctcccaccgacgcaacaggggcttggcctgcgtcggtgccccggggcttcccgccttcccgaagaaactcattaccatacccggaaccccaggggaccaatgcgggttcattgagcgacccgcgggccaatgcgcgaggggccgtgtgttccgccaaaaaagcaattagcataacccggaaccccaggggagtggttacgcgcggcgcgggaggcggggaataccggggttgcccattaagggccgcgggaattgccggaagcgggaagggcggccggggccgcccattaatgagtttctaattaccataccgggaagcggaacaaggcctcttgcaagtttttaattaccataccgggaagtgggcggcccggcccattgggcggtaactcccgcccaatgggccgggccccgaagactcggcggacgctggttggccgggccccgccgcgctggcggccgccgattggccagtcccgcccccgaggcggcccgccctgtgagggcgggctggctccaagcgtatatatgcgcggctcctgccatcgtctctccggatctagagatctccggaattaattcgccctatagtgagtcggaattaggagcaatacccccgatccagcgtccaacaagaaccgccaccgccagagccacctccacctgacccgccgcctcctagatcttcttctgagatgagtttttgttctgaattcccgataggaatccccactgtgttgacctggtccttgagtcccagcaggctgtaggcaatacgcttctggtggccaggaagacgcactccgatccttttgatgtcttcgttggacatctgtaccaccttctcgatggccgtgtagccagccaccatgaagtgttccgtgtactgttgcatcttgatgctctccagccactcggacaccgtacggaaggggactccctccgagccgctggtgctgggcagccggatggacactcggggatcaaagtcagccagcgtcttgagggagtcgggggctcggatgagcttgtccaggatgctaacgatgtcggcaaacttgggtcggcgggagcgctcttgctgccagcactgcatcatgagctggtaaatggctgaagggcagtccatgggcgtagggagccggaagccgtcgttgatggctttcatgacctcgtggtttgacagttcccagtagggccgttcgccataagtcatcacttcccacatgacaatgccgtagctccacacatcgctggctgaggtgaacttgcggtaggaaatggcctctggggctgtccatcgaatagggatcttgccgccacttgtggtgtaggtggcctcggggtcatcttccagcacacgcgacaggccaaaatcggacaccttgcacaccaggttgctgttgacgaggatgttgcgggcggccaggtcccggtgcacgtagttcatgttggccaggtacttcatgccggatgcgatacccctcagcatgcccaccaactgaagtacactgaactcaccatccttctccctaaggaacttgtctagcgctccattctccatgtactctgtgataatcatcatgggtttgtatttagagaccacgccctccaggcggatgatattgtggtggctaaactggcccatgatgctggcctcgctcaggaagtccacccgctgcttctcagtgtagcccgctttcagtgtcttgatggccaccggtatctccttcttccccgaggatgccttcagcgtccctttatagacctctccaaactctcctgctccaatgaccttctgccttgccacacaggatgggtggatctcggtggtaaacttgagtacagcctggttggggtcttcgtaagtgtgaggatccacataggtcttcaggggctttagttgttctgacttggaaaaacggacaacttcctttccctgtgccgccgcggccgccagcgcgcaaccccacagcagcgccaggcagaaaccgactgcccggagctccatggtcgacccgggatccggtaccactttgtgcggccagcttcctaggagatcctctagctagagtcggtgtcttctatggaggtcaaaacagcgtggatggcgtctccaggcgatctgacggttcactaaaccagctctgcttatatagagctcggggagcagaagcgcgcgaacagaagcgagaagcgaactgattggttagttcaaataaggcacagggtcatttcaggtccttggggcaccctggaaacatctgatggttctctagaaactgctgagggcgggaccgcatctggggaccatctgttcttggccctgagcggggcaggaactgcttaccacagatatcctgtttggcccatattctcctgttccaactgttcttggccctgagcggggcaggaactgcttaccacagatatcctgtttggcccatattctcctgtttctctgttcctgaccttgatcctagcttgccaaacctacaggtggggtctttcattcccataggcggttacctgggactgtgcggttgggacggcgcccgtgggcccgggcggccgggggcggcgggggccgcgatggcggcggcggcgggccatggagacagagagcgtgccggggtggtagagtttgacaggcaagcatgtgcgtgcagaggcgagtagtgcttgcctgtctaactcgctcgtctcggccgcggggggcccgggctgcgccgccgcgctttaaagggccgcgcgcgacccccggggggtgtgtttcggggggggcccgttttccgctcctccccccgctcctccccccgctcctccccccgctcctccccccgctcctccccccgctcctccccccgctcctccccccgctcctccccccgctcctccccccgctcctccccccgctcctccccccgctcctccccccgctcctccccccgctcctccccccgctcctccccccgctcctccccccgctcctccccccgctcctccccccgctccccaacgcccgccgcgcgcgcgcacgccgcccggaccgccgcccgccttttttgcgcgccgccccgcccgcggggggcccgggctgccacaggtgtaacaacaccaacagaacaccaacagcacggcgcaccggcgactccggttcctcatccacacgtcacacgtcacgtcatccaccacacctgcccaccaacacaactcacagcgacaactcaccgcgcaacaactcctgttcctcatccacacgtcaccgcgcaccccccgctcctccagacgtcccccagcgcaacacgccgctcctgtcacacaccaccgccccagccctccccagccccagccctccccagccccagccctccccggccccagccctccccggccccagccctccccggccccagccctccccggccccagccctccccggccccagccctccccggccccagccctccccggccgcgtcccgcgctccctcgggggggttcgggcatctctacctcagtgccgccaatctcaggtcagagatccaaaccctccgggggcgcccgcgcaccaccaccgcccctcgccccctcccgcccctcgccccctcccgcccctcgccccctcccgcccctcgccccctcccgcccctcgccccctcccgcccctcgccccctcccgcccctcgccccctcccgcccctcgccccctcccgcccctcgccccctcccgcccctcgccccctcccgcccctcgccccctcccgcccctcgccccctcccgcccctcgccccctcccgcccctcgccccctcccgcccctcgccccctcccgcccctcgccccctcccgcccctcgccccctcccgcccctcgccccctcccgcccctcgccccctcccgcccctcgaaataaacaacgctactgcaaaactaaatcaggtcgttgtcgtttattgcgtcttcgggtttcgcaagcgccccgccccgtcccggcccgttacagcaccccgtccccctcgaacgcgccgccgtcgtcgtcgtcccaggcgccttcccagtccacaacttcccgtcgcgggggcgtggccaagcccgcctccgcccccagcacctccacggcccccgccgccgccagcacggtgccgctgcggcccgtggccgaggcccagcgaatcccgggcaacgccggcggcagggcccccgggccgtcgtcgtcgtcgtcgccgccgcgcagcaccagcgggggggcgtcgtcgtcgggctccagcagggcgcgggcgcaaaagtccctccgcggcccgcgccaccgggccgggccggcgcgcaccgcctcgcgccccagcgccacgtacacgggccgcagcggcgcgcccaggccccagcgcgcgcaggcgcggtgcgagtgggcctcctcctcgcagaagtccggcgcgccgggcgccatggcgtcggtggtccccgaggccgccgcccggccgtccagcgccggcagcacggcccggcggtactcgcgcggggacatgggcaccggcgtgtccgggccgaagcgcgtgcgcacgcggtagcgcacgttgccgccgcggcacaggcgcagcggcggcgcgtcggggtacaggcgcgcgtgcgcggcctccacgcgcgcgaagacccccgggccgaacacgcggcccggggccagcaccgtgcggcgcaggtcccgcgccgccggccagcgcacggcgcactgcacggcgggcagcaggtcgcacgccaggtaggcgtgctgccgcgacaccgcgggcccgtcggcgggccagtcgcaggcgcgcacggtgttgaccacgatgagccgccggtcgccggcgctggcgagcagccccagaaactccacggccccggcgaaggccaggtcccgcgtggacagcagcagcacgccctgcgcgcccagcgccgacacgtcgggggcgccggtccagttgcccgcccaggcggccgtgtccggcccgcacagccggttggccagggccgccagcaggcaggacagcccgccgcgctcggcggaccactccggcggcccccccgaggccccgccgccggccaggtcctcgcccggcagcggcgagtacagcaccaccacgcgcacgtcctcggggtcggggatctggcgcatccaggccgccatgcggcgcagcgggcccgaggcgcgcagggggccaaagaggcggcccccggcggccccgtgggggtgggggttatcgtcgtcgtcgccgccgccgcacgcggcctgggcggcggcggcgggcccggcgcaccgcgcggcgatcgaggccagggcccgcgggtcaaacatgagggccggtcgccaggggacggggaacagcgggtggtccgtgagctcggccacggcgcgcggggagcagtaggcctccagggcggcggccgcgggcgccgccgtgtggctgggccccgggggctgccgccgccagccgcccagggggtcggggccctcggcgggccggcgcgacagcgccacggggcgcgggcgggcctgcgccgcggcggcccggggcgccgcgggctgggcgggggcgggctcgggccccgggggcgtggaggggggcgcggggaggggggcgcgggcgtccgagccgggggcgtccgcgccgctcttcttcgtcttcgggggtcgcgggccgccgcctccgggcggccgggccgggccgggactcttgcgcttgcgcccctcccgcggcgcggcggaggcggcggcggccgccagcgcgtcggcggcgtccggtgcgctggcggccgccgccagcagggggcgcaggctctggttctcaaacagcaggtccgcggcggcggcggccgcggagctcggcaggcgcgggtcccgcggcagcgcggggcccagggccccggcgaccaggctcacggcgcgcacggcggccacggcggcctcgctgccgccggccacgcgcaggtccccgcgcaggcgcatgagcaccagcgcgtcgcgcacgaaccgcagctcgcgcagccacgcgcgcaggcggggcgcgtcggcgtgcggcggcggcggggaagcggggcccgcgggtccctccggccgcggggggctggcgggccgggccccggccagccccgggacggccgccaggtcgccgtcgaagccctcggccagcgcctccaggatcccgcggcaggcggccaggcactccacggccacgcggccggcctgggcgcggcgcccggcgtcgtcgtcggcgtcggcgtggcgggcggcgtcggggtcgtcgccccccgcgggggaggcgggcgcggcggacagccgccccagggcggcgaggatccccgcggcgccgtacccggcgggcaccgcgcgctcgcccggtgcggcggcggcggcgacgacggcggcggcgaccccctcgtcatctgcgccggcgccggggctccccgcggcccccgtcagcgccgcgttctcgcgcgccaacaggggcgcgtaggcgcggcgcaggctggtcagcaggaagcccttctgcgcgcggtcgtatcggcggctcatggccacggcggccgccgcgtgcgccaggccccagccgaagcggccggccgccatggcgtagcccaggtggggcacggcccgcgccacgctgccggtgatgaaggagctgctgttgcgcgcggcgcccgagatccggaagcaggcctggtccagcgccacgtccccggggaccacgcgcgggttctggagccaccccatggcctccgcgtccggggtgtacagcagccgcgtgatcagggcgtactgctgcgcggcgtcgcccagctcgggcgcccacacggccgccggggcgcccgaggcctcgaaccggcgtcgcgcctcctccgcctcgggcgccccccagaggcccgggcggctgtcgcccaggccgccgtacagcacccgccccgggggcgggggcccggcgccgggccacggctccccgctgacgtacccgtcgcgatagcgcgcgtagaaggcgccggaggccgcgtcggcgtccagctcgacccgccggggctgcccggccgtgaagcggcccgtggcgtcgcggccggccaccgccgcgcgggcccggcggcgctcgatgcggcccgcggaggccgcgggggtcctcgccgccgcccggggcttgggcgcggcctcggagagggggggtggcccgggcgggggcggcgtccgcccgggggcttccggcgccgcgctcgacggaccccgcccgacggcccgcgcctcgcgtgcgcggtcggccgcgtcgttgccgtcgtcgtcctcgtcctcgtcggacgacgaggacgaagaggatgcggacgacgaggacgaggacccggagtccgacgaggtcgatgacgccgatggccgccgccggccgtgacgacgtctccgcggcggctgggccggcgggcgcggcgacaggcggtccgtggggtccggatacgcgccgcgtagcggggcctcccgtgcgcggccccgggccggggcccggtcgccggcggcgtcggctgcgtcgtcgtactcgtccccgtcatcgtcgtcggctcgaaaggcgggggtccggggcggcgaggccgcggggtcgggcgtcgggatcgtccggacggcctcctctaccatggaggccagcagggccagctgtcgcggcgagacggcgtccccggcgtcctcgccggcgtcggtgcccgccgcgggggccctcccgtcccgccgggcgtcgtcgaggtcgtgggggtggtcggggtcgtggtcggggtcgtccccgccctcctccgtctccgcgccccacccgagggccccccgctcgtcgcggtctgggctcggggtgggcggcggcccgtcggtggggcccggggagccggggcgctgcttgttctccgacgccatcgccgatgcggggcgatcctccggggatacggctgcgacggcggacgtagcacggtaggtcacctacggactctcgatggggagggggcgagacccacggaccccgacgacccccgccgtcgacgcggaactagcgcggaccggtcgatgcttgggtgggaaaaaggacagggacggccgatccccctcccgcgcttcgtccgcgtatcggcgtcccggcgcggcgagcgtctgacggtctgtctctggcggtcccgcgtcgggtcgtggatccgtgtcggcagccgcgctccgtgtggacgatcggggcgtcctcgggctcatatagtcccaggggccggcgggaaggaggagcagcggaggccgccggccccccgccccccaggcgggcccgccccgaacggaattccattatgcacgaccccgccccgacgccggcacgccgggggcccgtggccgcggcccgttggtcgaacccccggccccgcccatccgcgccatctgccatgggcggggcgcgagggcgggtgggcccgcgccccgccccgcatggcatctcattaccgcccgatccggtggtttccgcttccgttccgcatgctaacgaggaacgggccgggggcggggcccgggccccgacttcccggttcggcggtaatgagatacgagccccgcgcgcccgttggccgtccccgggcccccggtcccgcccgccggacgttgggaccaacgggacggcgggcggcccaagggccgcccgccttgccgcccccccattggccggcgggcgggaccgccccaagggggcggggccgccgggtaaaagaagtgagaacgcgaagcgttcgcacttcgtcccaatatatatatattattagggcgaagtgcgagcactggcgccgtgcccgactccgcgccggccccgggggcgggcccgggcggcggggggcgggtctctccggcgcacataaaggcccggcgcgaccgacgcccgcagacggcgccggccacgaacgacgggagcggctgcggagcacgcggaccgggagcgggactcgcagagggccgtcggagcggacggcgtcggcatcgcgacgccccggctcgggatcgggatcgcatcggaaagggacacgcggaaagacccacccaccccacccacgaaacacaggggacgcaccccgggggcctccgacgacagaaacccaccggtccgcctttgtgcacgggtaagcaccttgggtgggcggaggagggggggacgcgggggcggaggaggggggacgcgggggcggaggaggggggacgcgggggcggaggaggggggacgcgggggcggaggaggggggacgcgggggcggaggagggggctcacccgcgttcgtgccttcccgcaggaggaacgtcctcgtcgaggcgaccggcggcgaccgttgcgtggaccgcttcctgctcgtcgggcggggggaagccactgtggtcctccgggacgttttctggatggccgacatttccccaggcgcttttgcgccttgtgtaaaagcgcggcgtcccgctctccgatccccgcccctgggcacgcgcaagcgcaagcgcccttcccgccccctctcatcggagtctgaggtagaatccgatacagccttggagtctgaggtcgaatccgagacagcatcggattcgaccgagtctggggaccaggatgaagccccccgcatcggtggccgtagggccccccggaggcttggggggcggttttttctggacatgtcggcggaatccaccacggggacggaaacggatgcgtcggtgtcggacgaccccgacgacacgtccgactggtcttatgacgacattcccccacgacccaagcgggcccgggtaaacctgcggctcacgagctctcccgatcggcgggatggggttatttttcctaagatggggcgggtccggtctacccgggaaacgcagccccgggcccccaccccgtcggccccaagcccaaatgcaatgctacggcgctcggtgcgccaggcccagaggcggagcagcgcacgatggacccccgacctgggctacatgcgccagtgtatcaatcagctgtttcgggtcctgcgggtcgcccgggacccccacggcagtgccaaccgcctgcgccacctgatacgcgactgttacctgatgggatactgccgagcccgtctggccccgcgcacgtggtgccgtttgctgcaggtgtccggcggaacctggggcatgcacctgcgcaacaccatacgggaggtggaggctcgattcgacgccaccgcggaacccgtgtgcaagcttccttgtttggagaccagacggtacggcccggagtgtgatcttagtaatctcgagattcatctcagcgcgacaagcgatgatgaaatctccgatgccaccgatctggaggccgccggttcggaccacacgctcgcgtcccagtccgacacggaggatgccccctcccccgttacgctggaaaccccagaaccccgcgggtccctcgctgtgcgtctggaggatgagtttggggagtttgactggaccccccaggagggctcccagccctggctgtctgcggtcgtggccgataccagctccgtggaacgcccgggcccatccgattctggggcgggtcgcgccgcagaagaccgcaagtgtctggacggctgccggaaaatgcgcttctccaccgcctgcccctatccgtgcagcgacacgtttctccggccgtgagtccggtcgccccgacccccttgtatgtccccaaataaaagaccaaaatcaaagcgtttgtcccagcgtcttaatggcgggaagggcggagagaaacagaccacgcgtacatggggggtgtttgggggtttattgacatcggggctacagggtggtaaccggatagcagatgtgaggaagtctgggccgttcgccgcgaacggcgatcagagggtccgtttcttgcggaccacggcccggtgatgtgggttgctcgtctgggatctcgggcatgcccatacacgcacaacacggacgccgcaccggatgggacgtcgtaagggggcctggggtagctgggtggggtttgtgcagagcaatcagggaccgcagccagcgcatacaatcgcgctcccgtccgtttgtcccgggcagtaccacgccgtactggtattcgtaccggctgagcagggtctccagggggtggttgggggccgcggggaacggggtccacgccacggtccactcgggcaaaaaccgagtcggcacggcccacggttctcccacccacgcgtctggggtcttgatggcgataaatcttaccccgagccggattttttgggcgtattcgagaaacggcacacacagatccgccgcgcctaccacccacaagtggtagaggcgaggggggctgggttggtctcggtgcagcagtcggaagcacgccacggcgtccacgacctcggtgctctccaaggggctgtcctccgcaaacaggcccgtggtggtgtttggggggcagcgacaggacctagtgcgcacgatcgggcgggtgggtttgggtaagtccatcagcggctcggccaaccgtcgaaggttggccggacgaacgacgaccggggtacccaggggttctgatgccaaaatgcggcactgcctaagcaggaagctccacagggccgggcttgcgtcgacggaagtccggggcagggcgttgttctggtcaaggagggtcattacgttgacgacaacaacgcccatgttggtatattacaggcccgtgtccgatttggggcacttgcagatttgtaaggccacgcacggcggggagacaggccgacgcgggggctgctctaaaaatttaagggccctacggtccacagacccgccttcccgggggggcccttggagcgaccggcagcggaggcgtccgggggaggggagggtgatttacgggggggtaggtcagggggtgggtcgtcaaactgccgctccttaaaaccccggggcccgtcgttcggggtgctcgttggttggcactcacggtgcggcgaatggcctgtcgtaagttttgtcgcgtttacgggggacagggcaggaggaaggaggaggccgtcccgccggagacaaagccgtcccgggtgtttcctcatggccccttttataccccagccgaggacgcgtgcctggactccccgcccccggagacccccaaaccttcccacaccacaccacccggcgatgccgagcgcctgtgtcatctgcaggagatcctggcccagatgtacggaaaccaggactaccccatagaggacgaccccagcgcggatgccgcggacgatgtcgacgaggacgccccggacgacgtggcctatccggaggaatacgcagaggagctttttctgcccggggacgcgcccggtccccttatcggggccaacgaccacatccctcccccgtgtggcgcatctccccccggtatacgacgacgcagccgggatgagattggggccacgggatttaccgcggaagaactggacgccatggacagggaggcggctcgagccatcagccgcggcggcaagcccccctcgaccatggccaagctggtgactggcatgggctttacgatccacggagcgctcaccccaggatcggaggggtgtgtctttgacagcagccacccagattacccccaacgggtaatcgtgaaggcggggtggtacacgagcacgagccacgaggcgcgactgctgaggcgactggaccaccccgcgatcctgcccctcctggacctgcatgtcgtctccggggtcacgtgtctggtcctccccaagtaccaggccgacctgtatacctatctgagtaggcgcctgaacccgctgggacgcccgcagatcgcagcggtctcccggcagctcctaagcgccgttgactacattcaccgccagggcattatccaccgcgacattaagaccgaaaatatttttattaacacccccgaggacatttgcctgggggactttggtgccgcgtgcttcgtgcagggttcccgatcaagccccttcccctacggaatcgccggaaccatcgacaccaacgcccccgaggtcctggccggggatccgtataccaccaccgtcgacatttggagcgccggtctggtgatcttcgagactgccgtccacaacgcgtccttgttctcggccccccgcggccccaaaaggggcccgtgcgacagtcagatcacccgcatcatccgacaggcccaggtccacgttgacgagttttccccgcatccagaatcgcgcctcacctcgcgctaccgctcccgcgcggccgggaacaatcgcccgccgtacacccgaccggcctggacccgctactacaagatggacatagacgtcgaatatctggtttgcaaagccctcaccttcgacggcgcgcttcgccccagcgccgcagagctgctttgtttgccgctgtttcaacagaaatgaccgcccccagggggcggtgctgtttgcgggttggcacaaaaagaccccgacccgcgtctgtggtgtttttggcatcatgtcgccgggcgccatgcgtgccgttgttcccattatcccattccttttggttcttgtcggtgtatcgggggttcccaccaacgtctcctccaccacccaaccccaactccagaccaccggtcgtccctcgcatgaagcccccaacatgacccagaccggcaccaccgactctcccaccgccatcagccttaccacgcccgaccacacaccccccatgccaagtatcggactggaggaggaggaagaggaggagggggccggggacggcgaacatcttgaggggggagatgggacccgtgacaccctaccccagtccccgggcccagccttcccgttggctgaggacgtcgagaaggacaaacccaaccgtcccgtagtcccatcccccgatcccaacaactcccccgcgcgccccgagaccagtcgcccgaagacaccccccaccattatcgggccgctggcaactcgccccacgacccgactcacctcaaagggacgacccttggttccgacgcctcaacataccccgctgttctcgttcctcactgcctcccccgccctggacaccctcttcgtcgtcagcaccgtcatccacaccttatcgtttttgtgtattggtgcgatggcgacacacctgtgtggcggttggtccagacgcgggcgacgcacacaccctagcgtgcgttacgtgtgcctgccgtccgaacgcgggtagggtatggggcgggggatggggagagcccacacgcggaaagcaagaacaataaaggcggtggtatctagttgatatgcatctctgggtgtttttggggtgtggcggacgcggggcggtcattggacggggtgcagttaaatacatgcccgggacccatgaagcatgcgcgacttccgggcctcggaacccacccgaaacggccaacggacgtctgagccaggcctggctatccggagaaacagcacacgacttggcgttctgtgtgtcgcgatgtctctgcgcgcagtctggcatctggggcttttgggaagcctcgtgggggctgttcttgccgccacccatcggggacctgcggccaacacaacggaccccttaacgcacgccccagtgtcccctcaccccagccccctggggggctttgccgtccccctcgtagtcggtgggctgtgcgccgtagtcctgggggcggcgtgtctgcttgagctcctgcgtcgtacgtgccgcgggtgggggcgttaccatccctacatggacccagttgtcgtataatttcccccccccccccccttctccgcatgggtgatgtcgggtccaaactcccgacaccaccagctggtatggtataaatcaccggtgcgccccccaaaccatgtccggcagggggatgggggggcgaatgcggagggcacccaacaacaccgggctaaccaggaaatccgtggccccggcccccaataaagatcgcggtagcccggccgtgtgacactatcgtccataccgaccacaccgacgaatcccctaagggggaggggccattttacgaggaggaggggtataacaaagtctgtctttaaaaagcaggggttagggagttgttcggtcataagcttcagcgcgaacgaccaactaccccgatcatcagttatccttaaggtctcttttgtgtggtgcgttccggtatggggggggctgccgccaggttgggggccgtgattttgtttgtcgtcatagtgggcctccatggggtccgcggcaaatatgccttggcggatgcctctctcaagatggccgaccccaatcgctttcgcggcaaagaccttccggtcctggaccagctgaccgaccctccgggggtccggcgcgtgtaccacatccaggcgggcctaccggacccgttccagccccccagcctcccgatcacggtttactacgccgtgttggagcgcgcctgccgcagcgtgctcctaaacgcaccgtcggaggccccccagattgtccgcggggcctccgaagacgtccggaaacaaccctacaacctgaccatcgcttggtttcggatgggaggcaactgtgctatccccatcacggtcatggagtacaccgaatgctcctacaacaagtctctgggggcctgtcccatccgaacgcagccccgctggaactactatgacagcttcagcgccgtcagcgaggataacctggggttcctgatgcacgcccccgcgtttgagaccgccggcacgtacctgcggctcgtgaagataaacgactggacggagattacacagtttatcctggagcaccgagccaagggctcctgtaagtacgccctcccgctgcgcatccccccgtcagcctgcctgtccccccaggcctaccagcagggggtgacggtggacagcatcgggatgctgccccgcttcatccccgagaaccagcgcaccgtcgccgtatacagcttgaagatcgccgggtggcacgggcccaaggccccatacacgagcaccctgctgcccccggagctgtccgagacccccaacgccacgcagccagaactcgccccggaagaccccgaggattcggccctcttggaggaccccgtggggacggtggcgccgcaaatcccaccaaactggcacataccgtcgatccaggacgccgcgacgccttaccatcccccggccaccccgaacaacatgggcctgatcgccggcgcggtgggcggcagtctcctggcagccctggtcatttgcggaattgtgtactggatgcgccgccgcactcaaaaagccccaaagcgcatacgcctcccccacatccgggaagacgaccagccgtcctcgcaccagcccttgttttactagatacccccccttaatgggtgcgggggggtcaggtctgcggggttgggatgggaccttaactccatataaagcgagtctggaaggggggaaaggcggacagtcgataagtcggtagcgggggacgcgcacctgttccgcctgtcgcacccacagctttttttgcgaaccgtcccgttccgggatgccgtgccgcccgttgcagggcctggtgctcgtgggcctctgggtctgtgccaccagcctggttgtccgtggccccacggtcagtctggtatcaaactcatttgtggacgccggggccttggggcccgacggcgtagtggaggaagacctgcttattctcggggagcttcgctttgtgggggaccaggtcccccacaccacctactacgatggggtcgtagagctgtggcactaccccatgggacacaaatgcccacgggtcgtgcatgtcgtcacggtgaccgcgtgcccacgtcgccccgccgtggctttcgccctgtgtcgcgcaaccgacagcactcacagccccgcatatcccaccctggagctgaatctggcccaacagccgcttttgcgggtccggagggcgacgcgtgactatgccggggtgtacgtgttacgcgtatgggtcggggacgcaccaaacgccagcctgtttgtcctggggatggccatagccgccgaagggactctggcgtacaacggctcggcccatggctcctgcgacccgaaactgcttccgtattcggccccgcgtctggccccggcgagcgtataccaacccgcccctaacccggcctccaccccctcgaccaccacctccaccccctcgaccaccacctccaccccctcgaccaccatccccgctccccaagcatcgaccacacccttccccacgggagacccaaaaccccaacctcacggggtcaaccacgaacccccatcgaatgccacgcgagcgacccgcgactcgcgatacgcgctaacggtgacccagataatccagatagccatccccgcgtccattatagccctggtgtttctggggagctgtatttgctttatacacagatgtcaacgccgctaccgacgctcccgccgcccgatttacaacccccagatacccactggcatctcatgcgcggtgaacgaagcggccatggcccgcctcggagccgagctcaaatcgcatccgagcaccccccccaaatcccggcgccggtcgtcacgcacaccaatgccctccctgacggccatcgccgaagagtcggagcccgcgggggcggctgggcttccgacgccccccgtggaccccacgacatccaccccaacgcctcccctgttggtataggtccacggccactggccgggggcaccacataaccgaccgcagtcactgagttgggaataaaccggtattatttacctatatacgtgtatgtccatttcttcccccccccccccggaaaccaaagaaggaaacaaagaatggatgggaggagttcaggaagccggggagagggcccgcggcgcatttaaggcgttgttgtgttgactttggctcttctggcgggttggtgcggtgctgtttgttgggctcccattttacccgaagatcggctgctatccccgggacatggatcgcggggcggtggtggggtttcttctcggtgtttgtgttgtatcgtgcttggcgggaacgcccaaaacgtcctggagacgggtgagtgtcggcgaggacgtttcgttgcttccagctccggggcctacggggcgcggcccgacccagaaactactatgggccgtggaacccctggatgggtgcggccccttacacccgtcgtgggtctcgctgatgccccccaagcaggtgcccgagacggtcgtggatgcggcgtgcatgcgcgctccggtcccgctggcgatggcgtacgcccccccggccccatctgcgaccgggggtctacggacggacttcgtgtggcaggagcgcgcggccgtggttaaccggagtctggttatttacggggtccgagagacggacagcggcctgtataccctgtctgtgggcgacataaaggacccggctcgccaagtggcctcggtggtcctggtggtgcaaccggccccagttccgaccccacccccgaccccagccgattacgacgaggatgacaatgacgagggcgagggcgaggacgaaagtctagccggcactcccgccagcgggaccccccggctcccgcctccccccgcccccccgaggtcttggcccagcgcccccgaagtctcacacgtgcgtggggtgaccgtgcgtatggagactccggaagctatcctgttttcccccggggaggcgtttagcacgaacgtctccatccatgccatcgcccacgacgaccagacctacaccatggacgtcgtctggttgaggttcgacgtgccgacctcgtgtgccgagatgcgaatatacgaatcgtgtctgtatcacccgcagctcccagagtgtctgtccccggccgacgctccgtgcgccgcgagtacgtggacgtctcgcctggccgtccgcagctacgcggggtgttccagaacaaaccccccgccgcgctgttcggccgaggctcacatggagcccttcccggggctggcgtggcaggcggcctccgtcaatctggagttccgggacgcgtccccacaacactccggcctgtatctgtgcgtggtgtacgtcaacgaccatattcacgcatggggccacattaccatcagcaccgcggcgcagtaccggaacgcggtggtggaacagcccctcccacagcgcggcgcggatttggccgagcccacccacccgcacgtcggggcccctccccacgcgcccccaacccacggcgccctgcggttaggggcggtgatgggggccgccctgctgctgtctgcgctggggttgtcggtgtgggcgtgtatgacctgttggcgcaggcgtgcctggcgggcggttaaaagcagggcctcgggtaaggggcccacgtacattcgcgtggccgacagcgagctgtacgcggactggagctcggacagcgagggagaacgcgaccaggtcccgtggctggcccccccggagagacccgactctccctccaccaatggatccggctttgagatcttatcaccaacggctccgtctgtatacccccgtagcgatgggcatcaatctcgccgccagctcacaacctttggatccggaaggcccgatcgccgttactcccaggcctccgattcgtccgtcttctggtaaggcgccccatcccgaggccccacgtcggtcgccgaactgggcgaccgccggcgaggtggacgtcggagacgagctaatcgcgatttccgacgaacgcggacccccccgacatgaccgcccgcccctcgccacgtcgaccgcgccctcgccacacccgcgacccccgggctacacggccgttgtctccccgatggccctccaggctgtcgacgccccctccctgtttgtcgcctggctggccgctcggtggctccggggggcttccggcctgggggccgtcctgtgtgggattgcgtggtatgtgacgtcaattgcccgaggcgcataaagggccggtggtccgcctagccgcagcaaattaaaaatcgtgagtcactgcgaccgcaacttcccacccggagctttcttccggcctcgatgacgtcccggctctccgatcccaactcctcagcgcgatccgacatgtccgtgccgctttatcccacggcctcgccagtttcggtcgaagcctactactcggaaagcgaagacgaggcggccaacgacttcctcgtacgcatgggccgccaacagtcggtattaaggcgtcgacgcagacgcacccgctgcgtcggcatggtgatcgcctgtctcctcgtggccgttctgtcgggcggatttggggcgctcctgatgtggctgctccgctaaaagaccgcatcgacacgcgcgtccttcttgtcgtctctcttcccccccatcaccccgcaatttgcacccagcctttaactacattaaattgggttcgattggcaatgttgtctcccggttgatttttgggtgggtggggagtgggtgggtggggagtgggtgggtggggagtgggtgggtggggagtgggtgggtggggagtgggtgggtggggagtgggtgggtggggagtgggtgggtggggagtgggtgggtggggagtgggtgggtggggagtggcaaggaagaaacaagcccgaccaccagacagaaaatgtaaccatacccaaaccgactctgggggctgtttgtggggtcggaaccataggatgaacaaaccaccccgtacctcccgcacccttgggtgcgggtggctcatcggcatctgtccggtatgggttgttccccacccacttgcgttcggacgtcttagaatcatggcggttttctatgccgacatcggttttctcccccgcaataagacacgatgcgataaaatctgtttgtgaaatttattaagggtacaaattgccctagcacaggggtggggttagggccgggtccccacacccaaacgcaccaaacagatgcaggcagtgggtcgagtacagccccgcgtacgaacacgtcgatgcgtgtgtcagacagcaccagaaagcacaggccatcaacaggtcgtgcatatgtcggtgggtttggacgcggggggccatggtggtgataaagttaatggccgccgtccgccagggccacaggggcgacgtctcttggttggcccggagccactgggtgtggaccagccgcgcgtggcggcccaacatggcccctgtagccgggggcgggggatcgcgcacgtttgcagcgcacatgcgagacacctcgaccacggttcggaagaaggcccggtggtccgcgggcaacatcaccaggtgcgcaagcgcccgggcgtccagagggtagagccctgagtcatccgaggttggctcatcgcccgggtcatgccgcaagtgcgtgtgggttgggcttccggtgggcgggacgcgaaccgcggtgtggagccctacgcgggcccgagcgtacgctccatcttgtggggagaaggggtctgggctcgccaggggggcatacttgcccgggctatacagacccgcgagccgtacgtggttcgcggggggtgcgtggggtccggggctcccggggaggccggggctcccggggttgtcgtggatccctggggtcacgcggtaccctggggtctctgggagctcgcggtactctgggttccctaggttctcggggtggtcgcggaacccggggctcccggggaacacgcggtgtcctggggattgttggcggtcggacggcttcagatggcttcgagatcgtagtgtccgcaccgactcgtagtagacccgaatctccacattgccccgccgcttgatcattatcaccccgttgcgggggtccggagatcatgcgcgggtgtcctcgaggtgcgtgaacacctctggggtgcatgccggcggacggcacgccttttaagtaaacatctgggtcgcccggcccaactggggccgggggttgggtctggctcatctcgagagccacggggggaaccaccctccgcccagaaacttgggcgatggtcgtacccgggactcaacgggttaccggattacggggactgtcggtcacggtcccgccggttcttcgatgtgccacacccaaggatgcgttgggggcgattttgggcagcagcccgggagagcgcagcagaggacgctccgggtcgtgcacggcggttttggccgcctcccggtcctcacgcccccttttattgatctcatcgcgtacgtcggcgtacgtcctgggcccaacccgcatgttgtccaggaaggtgtccgccatttccagggcccacgacatgctcccccgcccgacgagcaggaagcggtccacgcaacggtcgccgccggtcgccccgacgagcaggaagcggtccacgcaacggtcgccgccggtcgcctcgacgaggacgttcctcctgcgggaaggcacgaacgcgggtgagccccctcctccgcccccgcgtcccccctcctccgcccccgcgtcccccctcctccgcccccgcgtcccccctcctccgcccccgcgtcccccctcctccgcccccgcgtcccccctcctccgcccccgcgtcccccctcctccacccccgcgtccccccctcctccgcccacccaaggtgcttacccgtgcacaaaggcggaccggtgggtttctgtcgtcggaggcccccggggtgcgtcccctgtgtttcgtgggtggggtgggtgggtctttccgcgtgtccctttccgatgcgatcccgatcccgagccggggcgtcgcgatgccgacgccgtccgctccgacggccctctgcgagtcccgctcccggtccgcgtgctccgcagccgctcccgtcgttcgtggccggcgccgtctgcgggcgtcggtcgcgccgggcctttatgtgcgccggagagacccgccccccgccgcccgggcccgcccccggggccggcgcggagtcgggcacggcgccagtgctcgcacttcgccctaataatatatatatattgggacgaagtgcgaacgcttcgcgttctcacttcttttacccggcggccccgcccccttggggcggtcccgcccgccggccaatgggggggcggcaaggcgggcggcccttgggccgcccgccgtcccgttggtcccaacgtccggcgggcgggaccgggggcccggggacggccaacgggcgcgcggggctcgtatctcattaccgccgaaccgggaagtcggggcccgggccccgcccccggcccgttcctcgttagcatgcggaacggaagcggaaaccaccggatcgggcggtaatgagatgccatgcggggcggggcgcgggcccacccgccctcgcgccccgcccatggcagatggcgcggatgggcggggccgggggttcgaccaacgggccgcggccacgggcccccggcgtgccggcgtcggggcggggtcgtgcataatggaattccgttcggggcgggcccgcctggggggcggggggccggcggcctccgctgctcctccttcccgccggcccctgggactatatgagcccgaggacgccccgatcgtccacacggagcgcggctgccgacacggatccacgacccgacgcgggaccgccagagacagaccgtcagacgctcgccgcgccgggacgccgatacgcggacgaagcgcgggagggggatcggccgtccctgtcctttttcccacccaagcatcgaccggtccgcgctagttccgcgtcgacggcgggggtcgtcggggtccgtgggtctcgccccctccccatcgagagtccgtaggtgacctaccgtgctacgtccgccgtcgcagccgtatccccggaggatcgccccgcatcggcgatggcgtcggagaacaagcagcgccccggctccccgggccccaccgacgggccgccgcccaccccgagcccagaccgcgacgagcggggggccctcgggtggggcgcggagacggaggagggcggggacgaccccgaccacgaccccgaccacccccacgacctcgacgacgcccggcgggacgggagggcccccgcggcgggcaccgacgccggcgaggacgccggggacgccgtctcgccgcgacagctggccctgctggcctccatggtagaggaggccgtccggacgatcccgacgcccgaccccgcggcctcgccgccccggacccccgcctttcgagccgacgacgatgacggggacgagtacgacgacgcagccgacgccgccggcgaccgggccccggcccggggccgcgcacgggaggccccgctacgcggcgcgtatccggaccccacggaccgcctgtcgccgcgcccgccggcccagccgccgcggagacgtcgtcacggccggcggcggccatcggcgtcatcgacctcgtcggactccgggtcctcgtcctcgtcgtccgcatcctcttcgtcctcgtcgtccgacgaggacgaggacgacgacggcaacgacgcggccgaccgcgcacgcgaggcgcgggccgtcgggcggggtccgtcgagcgcggcgccggaagcccccgggcggacgccgcccccgcccgggccaccccccctctccgaggccgcgcccaagccccgggcggcggcgaggacccccgcggcctccgcgggccgcatcgagcgccgccgggcccgcgcggcggtggccggccgcgacgccacgggccgcttcacggccgggcagccccggcgggtcgagctggacgccgacgcggcctccggcgccttctacgcgcgctatcgcgacgggtacgtcagcggggagccgtggcccggcgccgggcccccgcccccggggcgggtgctgtacggcggcctgggcgacagccgcccgggcctctggggggcgcccgaggcggaggaggcgcgacgccggttcgaggcctcgggcgccccggcggccgtgtgggcgcccgagctgggcgacgccgcgcagcagtacgccctgatcacgcggctgctgtacaccccggacgcggaggccatggggtggctccagaacccgcgcgtggtccccggggacgtggcgctggaccaggcctgcttccggatctcgggcgccgcgcgcaacagcagctccttcatcaccggcagcgtggcgcgggccgtgccccacctgggctacgccatggcggccggccgcttcggctggggcctggcgcacgcggcggccgccgtggccatgagccgccgatacgaccgcgcgcagaagggcttcctgctgaccagcctgcgccgcgcctacgcgcccctgttggcgcgcgagaacgcggcgctgacgggggccgcggggagccccggcgccggcgcagatgacgagggggtcgccgccgccgtcgtcgccgccgccgccgcaccgggcgagcgcgcggtgcccgccgggtacggcgccgcggggatcctcgccgccctggggcggctgtccgccgcgcccgcctcccccgcggggggcgacgaccccgacgccgcccgccacgccgacgccgacgacgacgccgggcgccgcgcccaggccggccgcgtggccgtggagtgcctggccgcctgccgcgggatcctggaggcgctggccgagggcttcgacggcgacctggcggccgtcccggggctggccggggcccggcccgccagccccccgcggccggagggacccgcgggccccgcttccccgccgccgccgcacgccgacgcgccccgcctgcgcgcgtggctgcgcgagctgcggttcgtgcgcgacgcgctggtgctcatgcgcctgcgcggggacctgcgcgtggccggcggcagcgaggccgccgtggccgccgtgcgcgccgtgagcctggtcgccggggccctgggccccgcgctgccgcgggacccgcgcctgccgagctccgcggccgccgccgccgcggacctgctgtttgagaaccagagcctgcgccccctgctggcggcggccgccagcgcaccggacgccgccgacgcgctggcggccgccgccgcctccgccgcgccgcgggaggggcgcaagcgcaagagtcccggcccggcccggccgcccggaggcggcggcccgcgacccccgaagacgaagaagagcggcgcggacgcccccggctcggacgcccgcgcccccctccccgcgcccccctccacgcccccggggcccgagcccgcccccgcccagcccgcggcgccccgggccgccgcggcgcaggcccgcccgcgccccgtggcgctgtcgcgccggcccgccgagggccccgaccccctgggcggctggcggcggcagcccccggggcccagccacacggcggcgcccgcggccgccgccctggaggcctactgctccccgcgcgccgtggccgagctcacggaccacccgctgttccccgtcccctggcgaccggccctcatgtttgacccgcgggccctggcctcgatcgccgcgcggtgcgccgggcccgccgccgccgcccaggccgcgtgcggcggcggcgacgacgacgataacccccacccccacggggccgccgggggccgcctctttggccccctgcgcgcctcgggcccgctgcgccgcatggcggcctggatgcgccagatccccgaccccgaggacgtgcgcgtggtggtgctgtactcgccgctgccgggcgaggacctggccggcggcggggcctcgggggggccgccggagtggtccgccgagcgcggcgggctgtcctgcctgctggcggccctggccaaccggctgtgcgggccggacacggccgcctgggcgggcaactggaccggcgcccccgacgtgtcggcgctgggcgcgcagggcgtgctgctgctgtccacgcgggacctggccttcgccggggccgtggagtttctggggctgctcgccagcgccggcgaccggcggctcatcgtggtcaacaccgtgcgcgcctgcgactggcccgccgacgggcccgcggtgtcgcggcagcacgcctacctggcgtgcgacctgctgcccgccgtgcagtgcgccgtgcgctggccggcggcgcgggacctgcgccgcacggtgctggccccgggccgcgtgttcggcccgggggtcttcgcgcgcgtggaggccgcgcacgcgcgcctgtaccccgacgcgccgccgctgcgcctgtgccgcggcggcaacgtgcgctaccgcgtgcgcacgcgcttcggcccggacacgccggtgcccatgtccccgcgcgagtaccgccgggccgtgctgccggcgctggacggccgggcggcggcctcggggaccaccgacgccatggcgcccggcgcgccggacttctgcgaggaggaggcccactcgcaccgcgcctgcgcgcgctggggcctgggcgcgccgctgcggcccgtgtacgtggcgctggggcgcgaggcggtgcgcgccggcccggcccggtggcgcgggccgcggagggacttttgcgcccgcgccctgctggagcccgacgacgacgcccccccgctggtgctgcgcggcggcgacgacgacgacgacggcccgggggccctgccgccggcgttgcccgggattcgctgggcctcggccacgggccgcagcggcaccgtgctggcggcggcgggggccgtggaggtgctgggggcggaggcgggcttggccacgcccccgcgacgggaagttgtggactgggaaggcgcctgggacgacgacgacggcggcgcgttcgagggggacggggtgctgtaacgggccgggacggggcggggcgcttgcgaaacccgaagacgcaataaacgacaacgacctgatttagttttgcagtagcgttgtttatttcgaggggcgggagggggcgaggggcgggagggggcgaggggcgggagggggcgaggggcgggagggggcgaggggcgggagggggcgaggggcgggagggggcgaggggcgggagggggcgaggggcgggagggggcgaggggcgggagggggcgaggggcgggagggggcgaggggcgggagggggcgaggggcgggagggggcgaggggcgggagggggcgaggggcgggagggggcgaggggcgggagggggcgaggggcgggagggggcgaggggcgggagggggcgaggggcgggagggggcgaggggcgggagggggcgaggggcggtggtggtgcgcgggcgcccccggagggtttggatctctgacctgagattggcggcactgaggtagagatgcccgaacccccccgagggagcgcgggacgcggccggggagggctggggccggggagggctggggccggggagggctggggccggggagggctggggccggggagggctggggccggggagggctggggccggggagggctggggctggggagggctggggctggggagggctggggcggtggtgtgtgacaggagcggcgtgttgcgctgggggacgtctggaggagcggggggtgcgcggtgacgtgtggatgaggaacaggagttgttgcgcggtgagttgtcgctgtgagttgtgttggtgggcaggtgtggtggatgacgtgacgtgtgacgtgtggatgaggaaccggagtcgccggtgcgccgtgctgttggtgttctgttggtgttgttacacctgtggcagcccgggccccccgcgggcggggcggcgcgcaaaaaaggcgggcggcggtccgggcggcgtgcgcgcgcgcggcgggcgttgggggagcggggggaggagcggggggaggagcggggggaggagcggggggaggagcggggggaggagcggggggaggagcggggggaggagcggggggaggagcggggggaggagcggggggaggagcggggggaggagcggggggaggagcggggggaggagcggggggaggagcggggggaggagcggggggaggagcggggggaggagcggggggaggagcggaaaacgggccccccccgaaacacaccccccgggggtcgcgcgcggccctttaaagcg

SEQ ID NO: 11 - DNA, 3745 bp, Artificial Sequence
  hEphA2 ML extracted sequence derived from a human sequence
gcctatgggaatgaaagaccccacctgtaggtttggcaagctaggatcaaggtcaggaacagagaaacaggagaatatgggccaaacaggatatctgtggtaagcagttcctgccccgctcagggccaagaacagttggaacaggagaatatgggccaaacaggatatctgtggtaagcagttcctgccccgctcagggccaagaacagatggtccccagatgcggtcccgccctcagcagtttctagagaaccatcagatgtttccagggtgccccaaggacctgaaatgaccctgtgccttatttgaactaaccaatcagttcgcttctcgcttctgttcgcgcgcttctgctccccgagctctatataagcagagctggtttagtgaaccgtcagatcgcctggagacgccatccagctgttttgacctccatagaagacaccgactctagctagaggatctcctaggaagctggccgcacaaagtggtaccggatcccgggtcgaccatggagctccaggcagcccgcgcctgcttcgccctgctgtggggctgtgcgctggccgcggccgcggcggcgcagggcaaggaagtggtactgctggactttgctgcagctggaggggagctcggctggctcacacacccgtatggcaaagggtgggacctgatgcagaacatcatgaatgacatgccgatctacatgtactccgtgtgcaacgtgatgtctggcgaccaggacaactggctccgcaccaactgggtgtaccgaggagaggctgagcgtatcttcattgagctcaagtttactgtacgtgactgcaacagcttccctggtggcgccagctcctgcaaggagactttcaacctctactatgccgagtcggacctggactacggcaccaacttccagaagcgcctgttcaccaagattgacaccattgcgcccgatgagatcaccgtcagcagcgacttcgaggcacgccacgtgaagctgaacgtggaggagcgctccgtggggccgctcacccgcaaaggcttctacctggccttccaggatatcggtgcctgtgtggcgctgctctccgtccgtgtctactacaagaagtgccccgagctgctgcagggcctggcccacttccctgagaccatcgccggctctgatgcaccttccctggccactgtggccggcacctgtgtggaccatgccgtggtgccaccggggggtgaagagccccgtatgcactgtgcagtggatggcgagtggctggtgcccattgggcagtgcctgtgccaggcaggctacgagaaggtggaggatgcctgccaggcctgctcgcctggattttttaagtttgaggcatctgagagcccctgcttggagtgccctgagcacacgctgccatcccctgagggtgccacctcctgcgagtgtgaggaaggcttcttccgggcacctcaggacccagcgtcgatgccttgcacacgacccccctccgccccacactacctcacagccgtgggcatgggtgccaaggtggagctgcgctggacgccccctcaggacagcgggggccgcgaggacattgtctacagcgtcacctgcgaacagtgctggcccgagtctggggaatgcgggccgtgtgaggccagtgtgcgctactcggagcctcctcacggactgacccgcaccagtgtgacagtgagcgacctggagccccacatgaactacaccttcaccgtggaggcccgcaatggcgtctcaggcctggtaaccagccgcagcttccgtactgccagtgtcagcatcaaccagacagagccccccaaggtgaggctggagggccgcagcaccacctcgcttagcgtctcctggagcatccccccgccgcagcagagccgagtgtggaagtacgaggtcacttaccgcaagaagggagactccaacagctacaatgtgcgccgcaccgagggtttctccgtgaccctggacgacctggccccagacaccacctacctggtccaggtgcaggcactgacgcaggagggccagggggccggcagcaaggtgcacgaattccagacgctgtccccggagggatctggcaacttggcggtgattggcggcgtggctgtcggtgtggtcctgcttctggtgctggcaggagttggcttctttatccaccgcaggaggaagaaccagcgtgcccgccagtccccggaggacgtttacttctccaagtcagaacaactgaagcccctgaagacatacgtggacccccacacatatgaggaccccaaccaggctgtgttgaagttcactaccgagatccatccatcctgtgtcactcggcagaaggtgatcggagcaggagagtttggggaggtgtacaagggcatgctgaagacatcctcggggaagaaggaggtgccggtggccatcaagacgctgaaagccggctacacagagaagcagcgagtggacttcctcggcgaggccggcatcatgggccagttcagccaccacaacatcatccgcctagagggcgtcatctccaaatacaagcccatgatgatcatcactgagtacatggagaatggggccctggacaagttccttcgggagaaggatggcgagttcagcgtgctgcagctggtgggcatgctgcggggcatcgcagctggcatgaagtacctggccaacatgaactatgtgcaccgtgacctggctgcccgcaacatcctcgtcaacagcaacctggtctgcaaggtgtctgactttggcctgtcccgcgtgctggaggacgaccccgaggccacctacaccaccagtggcggcaagatccccatccgctggaccgccccggaggccatttcctaccggaagttcacctctgccagcgacgtgtggagctttggcattgtcatgtgggaggtgatgacctatggcgagcggccctactgggagttgtccaaccacgaggtgatgaaagccatcaatgatggcttccggctccccacacccatggactgcccctccgccatctaccagctcatgatgcagtgctggcagcaggagcgtgcccgccgccccaagttcgctgacatcgtcagcatcctggacaagctcattcgtgcccctgactccctcaagaccctggctgactttgacccccgcgtgtctatccggctccccagcacgagcggctcggagggggtgcccttccgcacggtgtccgagtggctggagtccatcaagatgcagcagtatacggagcacttcatggcggccggctacactgccatcgagaaggtggtgcagatgaccaacgacgacatcaagaggattggggtgcggctgcccggccaccagaagcgcatcgcctacagcctgctgggactcaaggaccaggtgaacactgtggggatccccatcgggaattcagaacaaaaactcatctcagaagaagatctaggaggcggcgggtcaggtggaggtggctctggcggtggcggttaaaattccgactcactatagggcgaattaattccggagatctctagatccggagagacgatggcaggagccgcgcatatatacgcttggagccagcccgccctcacagggcgggccgcctcgggggcgggactggccaatcggcggccgccagcgcggcggggcccggccaaccagcgtccgccgagtcttcggggcccggcccattgggcgggagttaccgcc

SEQ ID NO: 12 - DNA, 3774 bp, Artificial Sequence
  hEphA2 MLM extracted sequence derived from a human sequence
gcctatgggaatgaaagaccccacctgtaggtttggcaagctaggatcaaggtcaggaacagagaaacaggagaatatgggccaaacaggatatctgtggtaagcagttcctgccccgctcagggccaagaacagttggaacaggagaatatgggccaaacaggatatctgtggtaagcagttcctgccccgctcagggccaagaacagatggtccccagatgcggtcccgccctcagcagtttctagagaaccatcagatgtttccagggtgccccaaggacctgaaatgaccctgtgccttatttgaactaaccaatcagttcgcttctcgcttctgttcgcgcgcttctgctccccgagctctatataagcagagctggtttagtgaaccgtcagatcgcctggagacgccatccacgctgttttgacctccatagaagacaccgactctagctagaggatctcctaggaagctggccgcacaaagtggtaccggatcccgggtcgaccatggagctccaggcagcccgcgcctgcttcgccctgctgtggggctgtgcgctggccgcggccgcggcggcgcagggcaaggaagtggtactgctggactttgctgcagctggaggggagctcggctggctcacacacccgtatggcaaagggtgggacctgatgcagaacatcatgaatgacatgccgatctacatgtactccgtgtgcaacgtgatgtctggcgaccaggacaactggctccgcaccaactgggtgtaccgaggagaggctgagcgtatcttcattgagctcaagtttactgtacgtgactgcaacagcttccctggtggcgccagctcctgcaaggagactttcaacctctactatgccgagtcggacctggactacggcaccaacttccagaagcgcctgttcaccaagattgacaccattgcgcccgatgagatcaccgtcagcagcgacttcgaggcacgccacgtgaagctgaacgtggaggagcgctccgtggggccgctcacccgcaaaggcttctacctggccttccaggatatcggtgcctgtgtggcgctgctctccgtccgtgtctactacaagaagtgccccgagctgctgcagggcctggcccacttccctgagaccatcgccggctctgatgcaccttccctggccactgtggccggcacctgtgtggaccatgccgtggtgccaccggggggtgaagagccccgtatgcactgtgcagtggatggcgagtggctggtgcccattgggcagtgcctgtgccaggcaggctacgagaaggtggaggatgcctgccaggcctgctcgcctggattttttaagtttgaggcatctgagagcccctgcttggagtgccctgagcacacgctgccatcccctgagggtgccacctcctgcgagtgtgaggaaggcttcttccgggcacctcaggacccagcgtcgatgccttgcacacgacccccctccgccccacactacctcacagccgtgggcatgggtgccaaggtggagctgcgctggacgccccctcaggacagcgggggccgcgaggacattgtctacagcgtcacctgcgaacagtgctggcccgagtctggggaatgcgggccgtgtgaggccagtgtgcgctactcggagcctcctcacggactgacccgcaccagtgtgacagtgagcgacctggagccccacatgaactacaccttcaccgtggaggcccgcaatggcgtctcaggcctggtaaccagccgcagcttccgtactgccagtgtcagcatcaaccagacagagccccccaaggtgaggctggagggccgcagcaccacctcgcttagcgtctcctggagcatccccccgccgcagcagagccgagtgtggaagtacgaggtcacttaccgcaagaagggagactccaacagctacaatgtgcgccgcaccgagggtttctccgtgaccctggacgacctggccccagacaccacctacctggtccaggtgcaggcactgacgcaggagggccagggggccggcagcaaggtgcacgaattccagacgctgtccccggagggatctggcaacttggcggtgattggcggcgtggctgtcggtgtggtcctgcttctggtgctggcaggagttggcttctttatccaccgcaggaggaagaaccagcgtgcccgccagtccccggaggacgtttacttctccaagtcagaacaactgaagcccctgaagacatacgtggacccccacacatatgaggaccccaaccaggctgtgttgaagttcactaccgagatccatccatcctgtgtcactcggcagaaggtgatcggagcaggagagtttggggaggtgtacaagggcatgctgaagacatcctcggggaagaaggaggtgccggtggccatcaagacgctgaaagccggctacacagagaagcagcgagtggacttcctcggcgaggccggcatcatgggccagttcagccaccacaacatcatccgcctagagggcgtcatctccaaatacaagcccatgatgatcatcactgagtacatggagaatggggccctggacaagttccttcgggagaaggatggcgagttcagcgtgctgcagctggtgggcatgctgcggggcatcgcagctggcatgaagtacctggccaacatgaactatgtgcaccgtgacctggctgcccgcaacatcctcgtcaacagcaacctggtctgcaaggtgtctgactttggcctgtcccgcgtgctggaggacgaccccgaggccacctacaccaccagtggcggcaagatccccatccgctggaccgccccggaggccatttcctaccggaagttcacctctgccagcgacgtgtggagctttggcattgtcatgtgggaggtgatgacctatggcgagcggccctactgggagttgtccaaccacgaggtgatgaaagccatcaatgatggcttccggctccccacacccatggactgcccctccgccatctaccagctcatgatgcagtgctggcagcaggagcgtgcccgccgccccaagttcgctgacatcgtcagcatcctggacaagctcattcgtgcccctgactccctcaagaccctggctgactttgacccccgcgtgtctatccggctccccagcacgagcggctcggagggggtgcccttccgcacggtgtccgagtggctggagtccatcaagatgcagcagtatacggagcacttcatggcggccggctacactgccatcgagaaggtggtgcagatgaccaacgacgacatcaagaggattggggtgcggctgcccggccaccagaagcgcatcgcctacagcctgctgggactcaaggaccaggtgaacactgtggggatccccatcgggaattcagaacaaaaactcatctcagaagaagatggaggcggcgggtcaggtggaggtggctctggcggtggcggttcttgttggacgctggatcgggggtattgctcctaattccgactcactatagggcgaattaattccggagatctctagatccggagagacgatggcaggagccgcgcatatatacgcttggagccagcccgccctcacagggcgggccgcctcgggggcgggactggccaatcggcggccgccagcgcggcggggcccggccaaccagcgtccgccgagtcttcggggcccggcccattgggcgggagttaccgcc

SEQ ID NO: 13 - DNA, 3781 bp, Artificial Sequence
  hEphA2 GPNMB target derived from a human sequence
gcctatgggaatgaaagaccccacctgtaggtttggcaagctaggatcaaggtcaggaacagagaaacaggagaatatgggccaaacaggatatctgtggtaagcagttcctgccccgctcagggccaagaacagttggaacaggagaatatgggccaaacaggatatctgtggtaagcagttcctgccccgctcagggccaagaacagatggtccccagatgcggtcccgccctcagcagtttctagagaaccatcagatgtttccagggtgccccaaggacctgaaatgaccctgtgccttatttgaactaaccaatcagttcgcttctcgcttctgttcgcgcgcttctgctccccgagctctatataagcagagctggtttagtgaaccgtcagatcgcctggagacgccatccacgctgttttgacctccatagaagacaccgactctagctagaggatctcctaggaagctggccgcacaaagtggtaccggatcccgggtcgaccatggagctccaggcagcccgcgcctgcttcgccctgctgtggggctgtgcgctggccgcggccgcggcggcggatactcttgtgacgcgttcgaatttttcttttaagcagggcaaggaagtggtactgctggactttgctgcagctggaggggagctcggctggctcacacacccgtatggcaaagggtgggacctgatgcagaacatcatgaatgacatgccgatctacatgtactccgtgtgcaacgtgatgtctggcgaccaggacaactggctccgcaccaactgggtgtaccgaggagaggctgagcgtatcttcattgagctcaagtttactgtacgtgactgcaacagcttccctggtggcgccagctcctgcaaggagactttcaacctctactatgccgagtcggacctggactacggcaccaacttccagaagcgcctgttcaccaagattgacaccattgcgcccgatgagatcaccgtcagcagcgacttcgaggcacgccacgtgaagctgaacgtggaggagcgctccgtggggccgctcacccgcaaaggcttctacctggccttccaggatatcggtgcctgtgtggcgctgctctccgtccgtgtctactacaagaagtgccccgagctgctgcagggcctggcccacttccctgagaccatcgccggctctgatgcaccttccctggccactgtggccggcacctgtgtggaccatgccgtggtgccaccggggggtgaagagccccgtatgcactgtgcagtggatggcgagtggctggtgcccattgggcagtgcctgtgccaggcaggctacgagaaggtggaggatgcctgccaggcctgctcgcctggattttttaagtttgaggcatctgagagcccctgcttggagtgccctgagcacacgctgccatcccctgagggtgccacctcctgcgagtgtgaggaaggcttcttccgggcacctcaggacccagcgtcgatgccttgcacacgacccccctccgccccacactacctcacagccgtgggcatgggtgccaaggtggagctgcgctggacgccccctcaggacagcgggggccgcgaggacattgtctacagcgtcacctgcgaacagtgctggcccgagtctggggaatgcgggccgtgtgaggccagtgtgcgctactcggagcctcctcacggactgacccgcaccagtgtgacagtgagcgacctggagccccacatgaactacaccttcaccgtggaggcccgcaatggcgtctcaggcctggtaaccagccgcagcttccgtactgccagtgtcagcatcaaccagacagagccccccaaggtgaggctggagggccgcagcaccacctcgcttagcgtctcctggagcatccccccgccgcagcagagccgagtgtggaagtacgaggtcacttaccgcaagaagggagactccaacagctacaatgtgcgccgcaccgagggtttctccgtgaccctggacgacctggccccagacaccacctacctggtccaggtgcaggcactgacgcaggagggccagggggccggcagcaaggtgcacgaattccagacgctgtccccggagggatctggcaacttggcggtgattggcggcgtggctgtcggtgtggtcctgcttctggtgctggcaggagttggcttctttatccaccgcaggaggaagaaccagcgtgcccgccagtccccggaggacgtttacttctccaagtcagaacaactgaagcccctgaagacatacgtggacccccacacatatgaggaccccaaccaggctgtgttgaagttcactaccgagatccatccatcctgtgtcactcggcagaaggtgatcggagcaggagagtttggggaggtgtacaagggcatgctgaagacatcctcggggaagaaggaggtgccggtggccatcaagacgctgaaagccggctacacagagaagcagcgagtggacttcctcggcgaggccggcatcatgggccagttcagccaccacaacatcatccgcctagagggcgtcatctccaaatacaagcccatgatgatcatcactgagtacatggagaatggggccctggacaagttccttcgggagaaggatggcgagttcagcgtgctgcagctggtgggcatgctgcggggcatcgcagctggcatgaagtacctggccaacatgaactatgtgcaccgtgacctggctgcccgcaacatcctcgtcaacagcaacctggtctgcaaggtgtctgactttggcctgtcccgcgtgctggaggacgaccccgaggccacctacaccaccagtggcggcaagatccccatccgctggaccgccccggaggccatttcctaccggaagttcacctctgccagcgacgtgtggagctttggcattgtcatgtgggaggtgatgacctatggcgagcggccctactgggagttgtccaaccacgaggtgatgaaagccatcaatgatggcttccggctccccacacccatggactgcccctccgccatctaccagctcatgatgcagtgctggcagcaggagcgtgcccgccgccccaagttcgctgacatcgtcagcatcctggacaagctcattcgtgcccctgactccctcaagaccctggctgactttgacccccgcgtgtctatccggctccccagcacgagcggctcggagggggtgcccttccgcacggtgtccgagtggctggagtccatcaagatgcagcagtatacggagcacttcatggcggccggctacactgccatcgagaaggtggtgcagatgaccaacgacgacatcaagaggattggggtgcggctgcccggccaccagaagcgcatcgcctacagcctgctgggactcaaggaccaggtgaacactgtggggatccccatcgggaattcagaacaaaaactcatctcagaagaagatctaggaggcggcgggtcaggtggaggtggctctggcggtggcggttaaaattccgactcactatagggcgaattaattccggagatctctagatccggagagacgatggcaggagccgcgcatatatacgcttggagccagcccgccctcacagggcgggccgcctcgggggcgggactggccaatcggcggccgccagcgcggcggggcccggccaaccagcgtccgccgagtcttcggggcccggcccattgggcgggagttacccc
